(19) United States
(12) Patent Application Publication
(10) Pub. No.: US 2024/0156989 A1
(43) Pub. Date: May 16, 2024

(54) Methods and Compositions for Modifying a Mutant Dystrophin Gene in a Cell's Genome

(71) Applicant: The Regents of the University of California, Oakland, CA (US)

(72) Inventors: April D. Pyle, Los Angeles, CA (US); Courtney S. Young, Los Angeles, CA (US); Melissa J. Spencer, Los Angeles, CA (US)

(21) Appl. No.: 18/305,863

(22) Filed: Apr. 24, 2023

Related U.S. Application Data
(63) Continuation of application No. 16/076,616, filed on Aug. 8, 2018, now Pat. No. 11,666,666.
(60) Provisional application No. 62/294,090, filed on Feb. 11, 2016.

(51) Int. Cl. A61K 48/00; A61P 21/00; C07K 14/47; C12N 5/074; C12N 15/113; C12N 15/90

(52) U.S. Cl. CPC A61K 48/0066; A61K 48/0091; A61P 21/00; C07K 14/4708; C12N 5/0696; C12N 15/113; C12N 15/907; A01K 2217/075; A01K 2227/105; A01K 2267/0306; C12N 15/861; C12N 2310/20

(57) ABSTRACT

The present disclosure provides a method of modifying a mutant dystrophin gene in the genome of a cell. The present disclosure further provides compositions and kits for modifying a mutant dystrophin gene in the genome of a cell.

### CROSS-REFERENCE

[0001] This application is a continuation of U.S. application Ser. No. 16/076,616 which is a 371 national phase entry of PCT/US2017/017255 which claims the benefit of U.S. Provisional Patent Application No. 62/294,090, filed Feb. 11, 2016, all of which are herein incorporated by reference in their entirety.

### STATEMENT REGARDING FEDERALLY SPONSORED RESEARCH

[0002] This invention was made with Government support under Grant Numbers AR057230 and AR064327, awarded by the National Institutes of Health, and under Grant Number 1144087, awarded by the National Science Foundation. The Government has certain rights in the invention.

### INCORPORATION BY REFERENCE OF SEQUENCE LISTING PROVIDED AS A TEXT FILE

[0003] A Sequence Listing as an XML file entitled, “20230424_034044_189CON1_ST26” created on Apr. 24, 2023 and having a size of 2,301,952 bytes and electronically submitted via Patent Center herewith the application is incorporated herein by reference in its entirety.

### INTRODUCTION

[0004] Dystrophin plays an important structural role in the muscle fiber, connecting the extracellular matrix and the cytoskeleton. The N-terminal region binds actin, whereas the C-terminal end is part of the dystrophin glycoprotein complex (DGC), which spans the sarcolemma. In the absence of functional dystrophin, mechanical stress leads to sarcolemmal ruptures, causing an uncontrolled influx of calcium into the muscle fiber interior, thereby triggering calcium-activated proteases and fiber necrosis.

[0005] Duchenne muscular dystrophy (DMD) is caused by a defect in the expression of dystrophin. The gene encoding dystrophin contains 79 exons spread out over more than 2 million nucleotides of DNA. Any exonic mutation that changes the reading frame of the exon, or introduces a stop codon, or is characterized by removal of an entire out of frame exon or exons or duplications of one or more exons has the potential to disrupt production of functional dystrophin, resulting in DMD. A frameshift in the DMD gene can result in the production of a truncated non-functional dystrophin protein, resulting in progressive muscle wasting and weakness.

### SUMMARY

[0006] The present disclosure provides a method of modifying a mutant dystrophin gene in the genome of a cell. The present disclosure further provides compositions and kits for modifying a mutant dystrophin gene in the genome of a cell.

[0007] The present disclosure provides a method of modifying a mutant dystrophin gene in a cell's genome, the method comprising introducing into the cell: a) a class 2 CRISPR/Cas endonuclease, or a nucleic acid comprising a nucleotide sequence encoding the class 2 CRISPR/Cas endonuclease; and b) first and second CRISPR/Cas guide RNAs corresponding to the class 2 CRISPR/Cas endonuclease, or one or more nucleic acids comprising nucleotide sequences encoding the first and second CRISPR/Cas guide RNAs, wherein the first CRISPR/Cas guide RNA comprises a guide sequence that hybridizes to a target sequence within intron 44 of the mutant dystrophin gene, and the second CRISPR/Cas guide RNA comprises a guide sequence that hybridizes to a target sequence within intron 55 of the mutant dystrophin gene, and wherein said introducing results in deletion of a greater than 330-kilobase region of the mutant dystrophin gene comprising exons 45-55. In some cases, the class 2 CRISPR/Cas endonuclease is a type II CRISPR/Cas endonuclease. In some cases, the class 2 CRISPR/Cas endonuclease is a Cas9 protein and the corresponding CRISPR/Cas guide RNA is a Cas9 guide RNA. In some cases, the class 2 CRISPR/Cas endonuclease is a type V or type VI CRISPR/Cas endonuclease. In some cases, the class 2 CRISPR/Cas endonuclease is a Cpf1 protein, a C2c1 protein, a C2c3 protein, or a C2c2 protein. In some cases, the guide sequence of the first CRISPR/Cas guide RNA (e.g., a Cas9 guide RNA) comprises the 17 nucleotide sequence set forth in any of SEQ ID NOs: 1155-1159. In some cases, the guide sequence of the first CRISPR/Cas guide RNA (e.g., a Cas9 guide RNA) comprises the 20 nucleotide sequence set forth in any of SEQ ID NOs: 1150-1154. In some cases, the guide sequence of the second CRISPR/Cas guide RNA (e.g., a Cas9 guide RNA) comprises the 17 nucleotide sequence set forth in any of SEQ ID NOs: 1175-1179. In some cases, the guide sequence of the second CRISPR/Cas guide RNA (e.g., a Cas9 guide RNA) comprises the 20 nucleotide sequence set forth in any of SEQ ID NOs: 1170-1174. In some cases, the guide sequence of the first CRISPR/Cas guide RNA (e.g., a Cas9 guide RNA) comprises the 17 nucleotide sequence GAAAUUAAACUACACAC (SEQ ID NO: 1158), and the guide sequence of the second CRISPR/Cas guide RNA (e.g., a Cas9 guide RNA) comprises the 17 nucleotide sequence AUGAUGCUAUAAUACCA (SEQ ID NO: 1177). In some cases, the guide sequence of the first CRISPR/Cas guide RNA (e.g., a Cas9 guide RNA) comprises the 20 nucleotide sequence GUUGAAAUUAAACUACACAC (SEQ ID NO: 1153) and the guide sequence of the second CRISPR/Cas guide RNA (e.g., a Cas9 guide RNA) comprises the 20 nucleotide sequence UGUAUGAUGCUAUAAUACCA (SEQ ID NO: 1172). In some cases, the target sequence within intron 44 and the target sequence within intron 55 are separated from each other by 500 kb or more. In some cases, the target sequence within intron 44 and the target sequence within intron 55 are separated from each other by 700 kb or more. In some cases, the cell is in vitro. In some cases, the cell is ex vivo. In some cases, the cell is in vivo. In some cases, the cell is a muscle cell. In some cases, the muscle cell derived from an induced pluripotent stem (iPS) cell. In some cases, the cell is a stem cell. In some cases, the stem cell is an induced pluripotent stem (iPS) cell. In some cases, the cell is a pericyte. In some cases, the cell is a type 2 pericyte. In some cases, is a muscle stem cell. In some cases, the cell is a myogenic precursor cell. In some cases, the method includes, after the introducing step, a step of transplanting the cell into an individual (e.g., an individual having DMD). In some cases, the cell is autologous to the individual. Where the stem cell is an iPS cell, in some cases, the method comprises, after said introducing step, a step of inducing the iPS cell to differentiate into a muscle cell. Where the stem cell is an iPS cell, in some cases, the method comprises, after said introducing step, a step of inducing the iPS cell to differentiate into a muscle cell; and transplanting the differentiated muscle cell into an individual (e.g., an individual having DMD).

[0008] The present disclosure provides a kit for modifying a mutant dystrophin gene in a cell's genome, the kit comprising: (i) a first CRISPR/Cas guide RNA (e.g., a Cas9 guide RNA) comprising a guide sequence having 100% complementarity over 17 or more contiguous nucleotides with a target sequence corresponding to intron 44 of the human dystrophin gene, and (ii) a second CRISPR/Cas guide RNA (e.g., a Cas9 guide RNA) comprising a guide sequence having 100% complementarity over 17 or more contiguous nucleotides with a target sequence corresponding to intron 55 of the human dystrophin gene, wherein the target sequence within intron 44 and the target sequence within intron 55 are separated from each other by greater than 330 kb. In some cases, the guide sequence of the first CRISPR/Cas guide RNA (e.g., a Cas9 guide RNA) comprises the 17 nucleotide sequence set forth in any of SEQ ID NOs: 1155-1159. In some cases, the guide sequence of the first CRISPR/Cas guide RNA (e.g., a Cas9 guide RNA) comprises the 20 nucleotide sequence set forth in any of SEQ ID NOs: 1150-1154. In some cases, the guide sequence of the second CRISPR/Cas guide RNA (e.g., a Cas9 guide RNA) comprises the 17 nucleotide sequence set forth in any of SEQ ID NOs: 1175-1179. In some cases, the guide sequence of the second CRISPR/Cas guide RNA (e.g., a Cas9 guide RNA) comprises the 20 nucleotide sequence set forth in any of SEQ ID NOs: 1170-1174. In some cases, the guide sequence of the first CRISPR/Cas guide RNA (e.g., a Cas9 guide RNA) comprises the 17 nucleotide sequence GAAAUUAAACUACACAC (SEQ ID NO: 1158), and the guide sequence of the second CRISPR/Cas guide RNA (e.g., a Cas9 guide RNA) comprises the 17 nucleotide sequence AUGAUGCUAUAAUACCA (SEQ ID NO: 1177). In some cases, the guide sequence of the first CRISPR/Cas guide RNA (e.g., a Cas9 guide RNA) comprises the 20 nucleotide sequence GUUGAAAUUAAACUACACAC (SEQ ID NO: 1153) and the guide sequence of the second CRISPR/Cas guide RNA (e.g., a Cas9 guide RNA) comprises the 20 nucleotide sequence UGUAUGAUGCUAUAAUACCA (SEQ ID NO: 1172). In some cases, the guide sequence of the first CRISPR/Cas guide RNA (e.g., a Cas9 guide RNA) has 100% complementarity over 20 contiguous nucleotides with a target sequence corresponding to intron 44 of the human dystrophin gene, and the guide sequence of the second CRISPR/Cas guide RNA (e.g., a Cas9 guide RNA) has 100% complementarity over 20 contiguous nucleotides with a target sequence corresponding to intron 55 of the human dystrophin gene. In some cases, the target sequence corresponding to intron 44 and the target sequence corresponding to intron 55 are separated from each other by 500 kb or more. In some cases, the target sequence within intron 44 and the target sequence within intron 55 are separated from each other by 700 kb or more. In some cases, the kit further comprises a class 2 CRISPR/Cas endonuclease, or a nucleic acid comprising a nucleotide sequence encoding the class 2 CRISPR/Cas endonuclease. In some cases, the class 2 CRISPR/Cas endonuclease is a Cas9 protein. In some cases, the first and second CRISPR/Cas guide RNAs are Cas9 guide RNAs. In some cases, the first and second CRISPR/Cas guide RNAs are single molecule CRISPR/Cas guide RNAs.

[0009] The present disclosure provides a method of treating Duchenne muscular dystrophy in an individual, the method comprising: a) modifying a mutant dystrophin gene in the genome of a cell obtained from the individual, the method comprising introducing into the cell in vitro: i) a class 2 CRISPR/Cas endonuclease, or a nucleic acid comprising a nucleotide sequence encoding the class 2 CRISPR/Cas endonuclease; and ii) first and second CRISPR/Cas guide RNAs corresponding to the class 2 CRISPR/Cas endonuclease, or one or more nucleic acids comprising nucleotide sequences encoding the first and second CRISPR/Cas guide RNAs, wherein the first CRISPR/Cas guide RNA comprises a guide sequence that hybridizes to a target sequence within intron 44 of the mutant dystrophin gene, and the second CRISPR/Cas guide RNA comprises a guide sequence that hybridizes to a target sequence within intron 55 of the mutant dystrophin gene, and wherein said introducing results in deletion of a greater than 330-kilobase region of the mutant dystrophin gene comprising exons 45-55, thereby producing a modified cell; and b) introducing the modified cell at or near a treatment site in the individual, or introducing the modified cell systemically into the individual. In some cases, the treatment site is in or around a muscle. In some cases, introducing the modified cell systemically comprises intravenous administration of the modified cell. In some cases, the cell is a muscle cell. In some cases, the cell is a pericyte. In some cases, the muscle cell derived from an induced pluripotent stem (iPS) cell. In some cases, the cell is a stem cell. In some cases, the stem cell is an induced pluripotent stem (iPS) cell. In some cases, the individual is a human. In some cases, the class 2 CRISPR/Cas endonuclease is a type II CRISPR/Cas endonuclease. In some cases, the class 2 CRISPR/Cas endonuclease is a Cas9 protein and the corresponding CRISPR/Cas guide RNA is a Cas9 guide RNA. In some cases, the class 2 CRISPR/Cas endonuclease is a type V or type VI CRISPR/Cas endonuclease. In some cases, the class 2 CRISPR/Cas endonuclease is a Cpf1 protein, a C2c1 protein, a C2c3 protein, or a C2c2 protein. In some cases, the guide sequence of the first CRISPR/Cas guide RNA comprises the 17-nucleotide sequence set forth in any of SEQ ID NOs: 1155-1159. In some cases, the guide sequence of the first CRISPR/Cas guide RNA comprises the 20 nucleotide sequence set forth in any of SEQ ID NOs: 1150-1154. In some cases, the guide sequence of the second CRISPR/Cas guide RNA comprises the 17 nucleotide sequence set forth in any of SEQ ID NOs: 1175-1179. In some cases, the guide sequence of the second CRISPR/Cas guide RNA comprises the 20 nucleotide sequence set forth in any of SEQ ID NOs: 1170-1174. In some cases, the guide sequence of the first CRISPR/Cas guide RNA comprises the 17 nucleotide sequence GAAAUUAAACUACACAC (SEQ ID NO: 1158), and the guide sequence of the second CRISPR/Cas guide RNA comprises the 17 nucleotide sequence AUGAUGCUAUAAUACCA (SEQ ID NO: 1177). In some cases, the guide sequence of the first CRISPR/Cas guide RNA comprises the 20 nucleotide sequence GUUGAAAUUAAACUACACAC (SEQ ID NO: 1153) and the guide sequence of the second CRISPR/Cas guide RNA comprises the 20 nucleotide sequence UGUAUGAUGCUAUAAUACCA (SEQ ID NO: 1172). In some cases, the target sequence within intron 44 and the target sequence within intron 55 are separated from each other by 500 kb or more. In some cases, the target sequence within intron 44 and the target sequence within intron 55 are separated from each other by 700 kb or more.

### BRIEF DESCRIPTION OF THE DRAWINGS

[0010] FIGS. 1A-ID depict the generation of CDMD hiPSC lines.

[0011] FIGS. 2A-2C depict the generation of CDMD hiPSC lines with an exon 45-55 deletion.

[0012] FIGS. 3A-3D depict gRNA activity and exon 45-55 deletion in 293FT cells.

[0013] FIGS. 4A-4D depict gRNAs showing cutting by Surveyor assay in CDMD hiPSCs.

[0014] FIGS. 5A-5D depict the effect of nucleofection of paired gRNAs in CDMD hiPSCs.

[0015] FIGS. 6A-6F depict the characterization of refrained CDMD hiPSC lines.

[0016] FIGS. 7A-7C depict dystrophin expression in refrained CDMD hiPSC-derived cardiomyocytes and skeletal muscle cells.

[0017] FIGS. 8A-8F depict in vitro and in vivo function of refrained CDMD hiPSC-derived cardiomyocytes and skeletal muscle cells.

[0018] FIGS. 9A-9C depict the in vivo electroporation of CRISPR platform into hDMD mice.

[0019] FIG. 10 depicts a schematic depiction of guide RNAs that were tested (e.g., see Table 2, provided in FIG. 23) and expected deletion size (‘total deletion distance’).

[0020] FIG. 11 depicts gels showing successful genomic deletion with various pairs of guide RNAs in 293T cells.

[0021] FIG. 12 depicts gels showing successful genomic deletion with various pairs of guide RNAs in 293T cells.

[0022] FIG. 13 depicts gels showing successful genomic deletion with various pairs of guide RNAs in iPSC cells.

[0023] FIG. 14 depicts a gel showing successful genomic deletion with various pairs of guide RNAs in iPSC cells.

[0024] FIG. 15 depicts a gel showing successful genomic deletion with various pairs of guide RNAs in iPSC cells.

[0025] FIG. 16 depicts a gel showing successful genomic deletion with various pairs of guide RNAs in iPSC cells.

[0026] FIG. 17 depicts gels showing successful genomic deletion with a pair of guide RNAs.

[0027] FIG. 18 depicts a gel showing successful genomic deletion with a pair of guide RNAs.

[0028] FIG. 19 depicts the cutting activity using guide RNAs of the target sequences within intron 44 or the guide RNAs of the target sequences within intron 55 of the mutant dystrophin gene in HEK293FT cells.

[0029] FIG. 20 depicts guide RNAs targeting intron 44 of the mutant dystrophin gene showing cutting by Surveyor assay.

[0030] FIG. 21 depicts gels showing genomic deletion with various pairs of guide RNAs.

[0031] FIG. 22 depicts guide RNAs targeting intron 55 of the mutant dystrophin gene showing cutting by Surveyor assay.

[0032] FIG. 23 provides Table 2, which provides example guide sequences of guide RNAs and non-complementary strands of target sequences that can be used to accomplish genomic deletion of a mutant dystrophin gene in human cells.

[0033] FIG. 24 provides Table 9, which provides example guide sequences of guide RNAs and non-complementary strands of target sequences that can be used to accomplish genomic deletions of a mutant dystrophin gene in human cells.

### DEFINITIONS

[0034] The terms “polynucleotide” and “nucleic acid,” used interchangeably herein, refer to a polymeric form of nucleotides of any length, either ribonucleotides or deoxyribonucleotides. Thus, this term includes, but is not limited to, single-, double-, or multi-stranded DNA or RNA, genomic DNA, cDNA, DNA-RNA hybrids, or a polymer comprising purine and pyrimidine bases or other natural, chemically or biochemically modified, non-natural, or derivatized nucleotide bases.

[0035] By “hybridizable” or “complementary” or “substantially complementary” it is meant that a nucleic acid (e.g. RNA, DNA) comprises a sequence of nucleotides that enables it to non-covalently bind, i.e. form Watson-Crick base pairs and/or G/U base pairs, “anneal”, or “hybridize,” to another nucleic acid in a sequence-specific, antiparallel, manner (i.e., a nucleic acid specifically binds to a complementary nucleic acid) under the appropriate in vitro and/or in vivo conditions of temperature and solution ionic strength. Standard Watson-Crick base-pairing includes: adenine (A) pairing with thymidine (T), adenine (A) pairing with uracil (U), and guanine (G) pairing with cytosine (C) [DNA, RNA]. In addition, for hybridization between two RNA molecules (e.g., dsRNA), and for hybridization of a DNA molecule with an RNA molecule (e.g., when a DNA target nucleic acid base pairs with a guide RNA, etc.): guanine (G) can also base pair with uracil (U). For example, G/U base-pairing is partially responsible for the degeneracy (i.e., redundancy) of the genetic code in the context of tRNA anti-codon base-pairing with codons in mRNA. Thus, in the context of this disclosure, a guanine (G) (e.g., of a protein-binding segment (dsRNA duplex) of a guide RNA molecule; of a target nucleic acid base pairing with a guide RNA, etc.) is considered complementary to both a uracil (U) and to an adenine (A). For example, when a G/U base-pair can be made at a given nucleotide position of a protein-binding segment (e.g., dsRNA duplex) of a guide RNA molecule, the position is not considered to be non-complementary, but is instead considered to be complementary.

[0036] Hybridization and washing conditions are well known and exemplified in Sambrook, J., Fritsch, E. F. and Maniatis, T. Molecular Cloning: A Laboratory Manual, Second Edition, Cold Spring Harbor Laboratory Press, Cold Spring Harbor (1989), particularly Chapter 11 and Table 11.1 therein; and Sambrook, J. and Russell, W., Molecular Cloning: A Laboratory Manual, Third Edition, Cold Spring Harbor Laboratory Press, Cold Spring Harbor (2001). The conditions of temperature and ionic strength determine the “stringency” of the hybridization.

[0037] Hybridization requires that the two nucleic acids contain complementary sequences, although mismatches between bases are possible. The conditions appropriate for hybridization between two nucleic acids depend on the length of the nucleic acids and the degree of complementarity, variables well known in the art. The greater the degree of complementarity between two nucleotide sequences, the greater the value of the melting temperature (Tm) for hybrids of nucleic acids having those sequences. For hybridizations between nucleic acids with short stretches of complementarity (e.g. complementarity over 35 or less, 30 or less, 25 or less, 22 or less, 20 or less, or 18 or less nucleotides) the position of mismatches can become important (see Sambrook et al., supra, 11.7-11.8). Typically, the length for a hybridizable nucleic acid is 8 nucleotides or more (e.g., 10 nucleotides or more, 12 nucleotides or more, 15 nucleotides or more, 20 nucleotides or more, 22 nucleotides or more, 25 nucleotides or more, or 30 nucleotides or more). Temperature, wash solution salt concentration, and other conditions may be adjusted as necessary according to factors such as length of the region of complementation and the degree of complementation.

[0038] It is understood that the sequence of a polynucleotide need not be 100% complementary to that of its target nucleic acid to be specifically hybridizable or hybridizable. Moreover, a polynucleotide may hybridize over one or more segments such that intervening or adjacent segments are not involved in the hybridization event (e.g., a bulge, a loop structure or hairpin structure, etc.). A polynucleotide can comprise 60% or more, 65% or more, 70% or more, 75% or more, 80% or more, 85% or more, 90% or more, 95% or more, 98% or more, 99% or more, 99.5% or more, or 100% sequence complementarity to a target region within the target nucleic acid sequence to which it will hybridize. For example, an antisense nucleic acid in which 18 of 20 nucleotides of the antisense compound are complementary to a target region, and would therefore specifically hybridize, would represent 90 percent complementarity. In this example, the remaining noncomplementary nucleotides may be clustered or interspersed with complementary nucleotides and need not be contiguous to each other or to complementary nucleotides. Percent complementarity between particular stretches of nucleic acid sequences within nucleic acids can be determined using any convenient method. Example methods include BLAST programs (basic local alignment search tools) and PowerBLAST programs (Altschul et al., J. Mol. Biol., 1990, 215, 403-410; Zhang and Madden, Genome Res., 1997, 7, 649-656), the Gap program (Wisconsin Sequence Analysis Package, Version 8 for Unix, Genetics Computer Group, University Research Park, Madison Wis.), e.g., using default settings, which uses the algorithm of Smith and Waterman (Adv. Appl. Math., 1981, 2, 482-489), and the like.

[0039] The terms “peptide,” “polypeptide,” and “protein” are used interchangeably herein, and refer to a polymeric form of amino acids of any length, which can include coded and non-coded amino acids, chemically or biochemically modified or derivatized amino acids, and polypeptides having modified peptide backbones.

[0040] “Binding” as used herein (e.g. with reference to an RNA-binding domain of a polypeptide, binding to a target nucleic acid, and the like) refers to a non-covalent interaction between macromolecules (e.g., between a protein and a nucleic acid; between a Cas9 protein/guide RNA complex and a target nucleic acid; and the like). While in a state of non-covalent interaction, the macromolecules are said to be “associated” or “interacting” or “binding” (e.g., when a molecule X is said to interact with a molecule Y, it is meant the molecule X binds to molecule Y in a non-covalent manner). Not all components of a binding interaction need be sequence-specific (e.g., contacts with phosphate residues in a DNA backbone), but some portions of a binding interaction may be sequence-specific. Binding interactions are generally characterized by a dissociation constant (K_{D}) of less than 10⁻⁶ M, less than 10⁻⁷ M, less than 10⁻⁸ M, less than 10⁻⁹ M, less than 10⁻¹⁰ M, less than 10⁻¹¹ M, less than 10⁻¹² M, less than 10⁻¹³ M, less than 10⁻¹⁴ M, or less than 10⁻¹⁵ M. “Affinity” refers to the strength of binding, increased binding affinity being correlated with a lower K_{D}.

[0041] By “binding domain” it is meant a protein domain that is able to bind non-covalently to another molecule. A binding domain can bind to, for example, a DNA molecule (a DNA-binding domain), an RNA molecule (an RNA-binding domain) and/or a protein molecule (a protein-binding domain). In the case of a protein having a protein-binding domain, it can in some cases bind to itself (to form homodimers, homotrimers, etc.) and/or it can bind to one or more regions of a different protein or proteins.

[0042] The term “conservative amino acid substitution” refers to the interchangeability in proteins of amino acid residues having similar side chains. For example, a group of amino acids having aliphatic side chains consists of glycine, alanine, valine, leucine, and isoleucine; a group of amino acids having aliphatic-hydroxyl side chains consists of serine and threonine; a group of amino acids having amide containing side chains consisting of asparagine and glutamine; a group of amino acids having aromatic side chains consists of phenylalanine, tyrosine, and tryptophan; a group of amino acids having basic side chains consists of lysine, arginine, and histidine; a group of amino acids having acidic side chains consists of glutamate and aspartate; and a group of amino acids having sulfur containing side chains consists of cysteine and methionine. Exemplary conservative amino acid substitution groups are: valine-leucine-isoleucine, phenylalanine-tyrosine, lysine-arginine, alanine-valine-glycine, and asparagine-glutamine.

[0043] A polynucleotide or polypeptide has a certain percent “sequence identity” to another polynucleotide or polypeptide, meaning that, when aligned, that percentage of bases or amino acids are the same, and in the same relative position, when comparing the two sequences. Sequence identity can be determined in a number of different ways. To determine sequence identity, sequences can be aligned using various convenient methods and computer programs (e.g., BLAST, T-COFFEE, MUSCLE, MAFFT, etc.), available over the world wide web at sites including ncbi.nlm.nili.gov/BLAST, ebi.ac.uk/Tools/msa/tcoffee/, ebi.ac.uk/Tools/msa/muscle/, mafft.cbrc.jp/alignment/software/. See, e.g., Altschul et al. (1990), J. Mol. Bioi. 215:403-10.

[0044] A DNA sequence that “encodes” a particular RNA is a DNA nucleic acid sequence that is transcribed into RNA. A DNA polynucleotide may encode an RNA (mRNA) that is translated into protein (and therefore the DNA and the mRNA both encode the protein), or a DNA polynucleotide may encode an RNA that is not translated into protein (e.g. tRNA, rRNA, microRNA (miRNA), a “non-coding” RNA (ncRNA), a guide RNA, etc.).

[0045] A “protein coding sequence” or a sequence that encodes a particular protein or polypeptide, is a nucleic acid sequence that is transcribed into mRNA (in the case of DNA) and is translated (in the case of mRNA) into a polypeptide in vitro or in vivo when placed under the control of appropriate regulatory sequences. The boundaries of the coding sequence are determined by a start codon at the 5′ terminus (N-terminus) and a translation stop nonsense codon at the 3′ terminus (C-terminus). A coding sequence can include, but is not limited to, cDNA from prokaryotic or eukaryotic mRNA, genomic DNA sequences from prokaryotic or eukaryotic DNA, and synthetic nucleic acids. A transcription termination sequence will usually be located 3′ to the coding sequence.

[0046] The terms “DNA regulatory sequences,” “control elements,” and “regulatory elements,” used interchangeably herein, refer to transcriptional and translational control sequences, such as promoters, enhancers, polyadenylation signals, terminators, protein degradation signals, and the like, that provide for and/or regulate transcription of a non-coding sequence (e.g., guide RNA) or a coding sequence (e.g., a class 2 CRISPR/Cas endonuclease such as a Cas9 protein) and/or regulate translation of an encoded polypeptide.

[0047] As used herein, a “promoter sequence” is a DNA regulatory region capable of binding RNA polymerase and initiating transcription of a downstream (3′ direction) coding or non-coding sequence. For purposes of the present disclosure, the promoter sequence is bounded at its 3′ terminus by the transcription initiation site and extends upstream (5′ direction) to include the minimum number of bases or elements necessary to initiate transcription at levels detectable above background. Within the promoter sequence will be found a transcription initiation site, as well as protein binding domains responsible for the binding of RNA polymerase. Eukaryotic promoters will often, but not always, contain “TATA” boxes and “CAT” boxes. Various promoters, including inducible promoters, may be used to drive the various vectors of the present disclosure.

[0048] The term “naturally-occurring” or “unmodified” or “wild type” as used herein as applied to a nucleic acid, a polypeptide, a cell, or an organism, refers to a nucleic acid, polypeptide, cell, or organism that is found in nature. For example, a polypeptide or polynucleotide sequence that is present in an organism (including viruses) that can be isolated from a source in nature and which has not been intentionally modified by a human in the laboratory is wild type (and naturally occurring).

[0049] The term “chimeric” as used herein as applied to a nucleic acid or polypeptide refers to two components that are defined by structures derived from different sources. For example, where “chimeric” is used in the context of a chimeric polypeptide (e.g., a chimeric Cas9 protein), the chimeric polypeptide includes amino acid sequences that are derived from different polypeptides. A chimeric polypeptide may comprise either modified or naturally-occurring polypeptide sequences (e.g., a first amino acid sequence from a modified or unmodified Cas9 protein; and a second amino acid sequence, e.g., a sequence from another species of Cas9, a sequence from a protein other than a Cas9 protein, etc.). Similarly, “chimeric” in the context of a polynucleotide encoding a chimeric polypeptide includes nucleotide sequences derived from different coding regions (e.g., a first nucleotide sequence encoding a modified or unmodified Cas9 protein; and a second nucleotide sequence encoding a polypeptide other than a Cas9 protein).

[0050] The term “chimeric polypeptide” refers to a polypeptide which is made by the combination (i.e., “fusion”) of two otherwise separated segments of amino sequence, usually through human intervention. A polypeptide that comprises a chimeric amino acid sequence is a chimeric polypeptide.

[0051] “Heterologous,” as used herein, means a nucleotide or polypeptide sequence that is not found in the native nucleic acid or protein, respectively. For example, in a chimeric Cas9 protein, the RNA-binding domain of a naturally-occurring bacterial Cas9 polypeptide (or a variant thereof) may be fused to a heterologous polypeptide sequence (i.e. a polypeptide sequence from a protein other than Cas9 or a polypeptide sequence from another organism). The heterologous polypeptide sequence may exhibit an activity (e.g., enzymatic activity) that will also be exhibited by the chimeric Cas9 protein (e.g., methyltransferase activity, acetyltransferase activity, kinase activity, ubiquitinating activity, etc.). A heterologous nucleic acid sequence may be linked to a naturally-occurring nucleic acid sequence (or a variant thereof) (e.g., by genetic engineering) to generate a chimeric nucleotide sequence encoding a chimeric polypeptide. As another example, in a fusion variant Cas9 polypeptide, a variant Cas9 polypeptide may be fused to a heterologous polypeptide (i.e. a polypeptide other than Cas9), which exhibits an activity that will also be exhibited by the fusion variant Cas9 polypeptide. A heterologous nucleic acid sequence may be linked to a variant Cas9 polypeptide (e.g., by genetic engineering) to generate a nucleotide sequence encoding a fusion protein.

[0052] “Recombinant,” as used herein, means that a particular nucleic acid (DNA or RNA) is the product of various combinations of cloning, restriction, polymerase chain reaction (PCR) and/or ligation steps resulting in a construct having a structural coding or non-coding sequence distinguishable from endogenous nucleic acids found in natural systems. DNA sequences encoding polypeptides can be assembled from cDNA fragments or from a series of synthetic oligonucleotides, to provide a synthetic nucleic acid which is capable of being expressed from a recombinant transcriptional unit contained in a cell or in a cell-free transcription and translation system. Genomic DNA comprising the relevant sequences can also be used in the formation of a recombinant gene or transcriptional unit. Sequences of non-translated DNA may be present 5′ or 3′ from the open reading frame, where such sequences do not interfere with manipulation or expression of the coding regions, and may indeed act to modulate production of a desired product by various mechanisms. Alternatively, DNA sequences encoding RNA (e.g., guide RNA) that is not translated may also be considered recombinant. Thus, e.g., the term “recombinant” nucleic acid refers to one which is not naturally occurring, e.g., is made by the artificial combination of two otherwise separated segments of sequence through human intervention. This artificial combination is often accomplished by either chemical synthesis means, or by the artificial manipulation of isolated segments of nucleic acids, e.g., by genetic engineering techniques. Such is usually done to replace a codon with a codon encoding the same amino acid, a conservative amino acid, or a non-conservative amino acid. Alternatively, it is performed to join together nucleic acid segments of desired functions to generate a desired combination of functions. This artificial combination is often accomplished by either chemical synthesis means, or by the artificial manipulation of isolated segments of nucleic acids, e.g., by genetic engineering techniques. When a recombinant polynucleotide encodes a polypeptide, the sequence of the encoded polypeptide can be naturally occurring (“wild type”) or can be a variant (e.g., a mutant) of the naturally occurring sequence. An example of such a case is a DNA (a recombinant) encoding a wild-type protein where the DNA sequence is codon optimized for expression of the protein in a cell (e.g., a eukaryotic cell) in which the protein is not naturally found (e.g., expression of a CRISPR/Cas endonuclease, e.g., in a eukaryotic cell). A codon-optimized DNA can therefore be recombinant and non-naturally occurring while the protein encoded by the DNA may have a wild type amino acid sequence.

[0053] Thus, the term “recombinant” polypeptide does not necessarily refer to a polypeptide whose amino acid sequence does not naturally occur. Instead, a “recombinant” polypeptide is encoded by a recombinant non-naturally occurring DNA sequence, but the amino acid sequence of the polypeptide can be naturally occurring (“wild type”) or non-naturally occurring (e.g., a variant, a mutant, etc.). Thus, a “recombinant” polypeptide is the result of human intervention, but may have a naturally occurring amino acid sequence.

[0054] A “vector” or “expression vector” is a replicon, such as plasmid, phage, virus, or cosmid, to which another DNA segment, i.e. an “insert”, may be attached so as to bring about the replication of the attached segment in a cell.

[0055] An “expression cassette” comprises a DNA coding sequence operably linked to a promoter. “Operably linked” refers to a juxtaposition wherein the components so described are in a relationship permitting them to function in their intended manner. For instance, a promoter is operably linked to a coding sequence (or the coding sequence can also be said to be operably linked to the promoter) if the promoter affects its transcription or expression.

[0056] The terms “recombinant expression vector,” or “DNA construct” are used interchangeably herein to refer to a DNA molecule comprising a vector and one insert. Recombinant expression vectors are usually generated for the purpose of expressing and/or propagating the insert(s), or for the construction of other recombinant nucleotide sequences. The insert(s) may or may not be operably linked to a promoter sequence and may or may not be operably linked to DNA regulatory sequences.

[0057] A cell has been “genetically modified” or “transformed” or “transfected” by exogenous DNA, e.g. a recombinant expression vector, when such DNA has been introduced inside the cell. The presence of the exogenous DNA results in permanent or transient genetic change. The transforming DNA may or may not be integrated (covalently linked) into the genome of the cell. In prokaryotes, yeast, and mammalian cells for example, the transforming DNA may be maintained on an episomal element such as a plasmid. With respect to eukaryotic cells, a stably transformed cell is one in which the transforming DNA has become integrated into a chromosome so that it is inherited by daughter cells through chromosome replication. This stability is demonstrated by the ability of the eukaryotic cell to establish cell lines or clones that comprise a population of daughter cells containing the transforming DNA. A “clone” is a population of cells derived from a single cell or common ancestor by mitosis. A “cell line” is a clone of a primary cell that is capable of stable growth in vitro for many generations.

[0058] Suitable methods of genetic modification (also referred to as “transformation”) include e.g., viral or bacteriophage infection, transfection, conjugation, protoplast fusion, lipofection, electroporation, calcium phosphate precipitation, polyethyleneimine (PEI)-mediated transfection, DEAE-dextran mediated transfection, liposome-mediated transfection, particle gun technology, calcium phosphate precipitation, direct micro injection, nanoparticle-mediated nucleic acid delivery (see, e.g., Panyam et., al Adv Drug Deliv Rev. 2012 Sep. 13. pii: S0169-409X(12)00283-9. doi: 10.1016/j.addr.2012.09.023), and the like.

[0059] The choice of method of genetic modification is generally dependent on the type of cell being transformed and the circumstances under which the transformation is taking place (e.g., in vitro, ex vivo, or in vivo). A general discussion of these methods can be found in Ausubel, et al., Short Protocols in Molecular Biology, 3rd ed., Wiley & Sons, 1995.

[0060] A “target nucleic acid” as used herein is a polynucleotide (e.g., DNA such as genomic DNA) that includes a site (“target site” or “target sequence”) targeted by a genome editing endonuclease. When the genome editing endonuclease is a CRISPR/Cas endonuclease, the target sequence is the sequence to which the guide sequence of a subject CRISPR/Cas guide RNA (e.g., a Cas9 guide RNA) will hybridize. For example, the target site (or target sequence) 5′-GAGCAUAUC-3′ within a target nucleic acid is targeted by (or is bound by, or hybridizes with, or is complementary to) the sequence 5′-GAUAUGCUC-3′. Suitable hybridization conditions include physiological conditions normally present in a cell. For a double stranded target nucleic acid, the strand of the target nucleic acid that is complementary to and hybridizes with the guide RNA is referred to as the “complementary strand” or “target strand”; while the strand of the target nucleic acid that is complementary to the “target strand” (and is therefore not complementary to the guide RNA) is referred to as the “non-target strand” or “non-complementary strand”.

[0061] By “cleavage” it is meant the breakage of the covalent backbone of a target nucleic acid molecule (e.g., RNA, DNA). Cleavage can be initiated by a variety of methods including, but not limited to, enzymatic or chemical hydrolysis of a phosphodiester bond. Both single-stranded cleavage and double-stranded cleavage are possible, and double-stranded cleavage can occur as a result of two distinct single-stranded cleavage events. In some embodiments, a complex comprising a CRISPR/Cas protein (e.g., a Cas9 protein) and a corresponding guide RNA is used for targeted cleavage of a double stranded DNA (dsDNA), e.g., induction of a double-stranded DNA break (DSB).

[0062] “Nuclease” and “endonuclease” are used interchangeably herein to mean an enzyme which possesses catalytic activity for nucleic acid cleavage (e.g., ribonuclease activity (ribonucleic acid cleavage), deoxyribonuclease activity (deoxyribonucleic acid cleavage), etc.). A “genome editing endonuclease” is an endonuclease that can be used for the editing of a cell's genome (e.g., by cleaving at a targeted location within the cell's genomic DNA). Examples of genome editing endonucleases include but are not limited to class 2 CRISPR/Cas endonucleases such as: (a) type II CRISPR/Cas proteins, e.g., a Cas9 protein; (b) type V CRISPR/Cas proteins, e.g., a Cpf1 protein, a C2c1 protein, a C2c3 protein, and the like; and (c) type VI CRISPR/Cas proteins, e.g., a C2c2 protein.

[0063] By “cleavage domain” or “active domain” or “nuclease domain” of a nuclease it is meant the polypeptide sequence or domain within the nuclease which possesses the catalytic activity for nucleic acid cleavage. A cleavage domain can be contained in a single polypeptide chain or cleavage activity can result from the association of two (or more) polypeptides. A single nuclease domain may consist of more than one isolated stretch of amino acids within a given polypeptide.

[0064] A “host cell” or “target cell” as used herein, denotes an in vivo or in vitro eukaryotic cell, a prokaryotic cell (e.g., bacterial or archaeal cell), or a cell from a multicellular organism (e.g., a cell line) cultured as a unicellular entity, which eukaryotic or prokaryotic cells can be, or have been, used as recipients for a subject genome targeting composition, and include the progeny of the original cell (e.g., when the cell has been transformed by the nucleic acid, or when the cells genome has been modified by the genome targeting composition). It is understood that the progeny of a single cell may not necessarily be completely identical in morphology or in genomic or total DNA complement as the original parent, due to natural, accidental, or deliberate mutation. A “recombinant host cell” (also referred to as a “genetically modified host cell”) is a host cell into which has been introduced a subject genome targeting composition, e.g., which can include a nucleic acid, e.g., an expression vector. For example, a subject bacterial host cell can be a genetically modified bacterial host cell by virtue of introduction into a suitable bacterial host cell of an exogenous nucleic acid (e.g., a plasmid or recombinant expression vector) and a subject eukaryotic host cell can be a genetically modified eukaryotic host cell (e.g., a mammalian germ cell), by virtue of introduction into a suitable eukaryotic host cell of an exogenous nucleic acid.

[0065] The term “stem cell” is used herein to refer to a cell (e.g., plant stem cell, vertebrate stem cell) that has the ability both to self-renew and to generate a differentiated cell type (see Morrison et al. (1997) Cell 88:287-298). In the context of cell ontogeny, the adjective “differentiated”, or “differentiating” is a relative term. A “differentiated cell” is a cell that has progressed further down the developmental pathway than the cell it is being compared with. Thus, pluripotent stem cells (described below) can differentiate into lineage-restricted progenitor cells (e.g., mesodermal stem cells), which in turn can differentiate into cells that are further restricted (e.g., neuron progenitors), which can differentiate into end-stage cells (i.e., terminally differentiated cells, e.g., neurons, cardiomyocytes, etc.), which play a characteristic role in a certain tissue type, and may or may not retain the capacity to proliferate further. Stem cells may be characterized by both the presence of specific markers (e.g., proteins, RNAs, etc.) and the absence of specific markers. Stem cells may also be identified by functional assays both in vitro and in vivo, particularly assays relating to the ability of stem cells to give rise to multiple differentiated progeny.

[0066] Stem cells of interest include pluripotent stem cells (PSCs). The term “pluripotent stem cell” or “PSC” is used herein to mean a stem cell capable of producing all cell types of the organism. Therefore, a PSC can give rise to cells of all germ layers of the organism (e.g., the endoderm, mesoderm, and ectoderm of a vertebrate). Pluripotent cells are capable of forming teratomas and of contributing to ectoderm, mesoderm, or endoderm tissues in a living organism. Pluripotent stem cells of plants are capable of giving rise to all cell types of the plant (e.g., cells of the root, stem, leaves, etc.).

[0067] PSCs of animals can be derived in a number of different ways. For example, embryonic stem cells (ESCs) are derived from the inner cell mass of an embryo (Thomson et. al, Science. 1998 Nov. 6; 282(5391):1145-7) whereas induced pluripotent stem cells (iPSCs) are derived from somatic cells (Takahashi et. al, Cell. 2007 Nov. 30; 131(5):861-72; Takahashi et. al, Nat Protoc. 2007; 2(12):3081-9; Yu et. al, Science. 2007 Dec. 21; 318(5858):1917-20. Epub 2007 Nov. 20). Because the term PSC refers to pluripotent stem cells regardless of their derivation, the term PSC encompasses the terms ESC and iPSC, as well as the term embryonic germ stem cells (EGSC), which are another example of a PSC. PSCs may be in the form of an established cell line, they may be obtained directly from primary embryonic tissue, or they may be derived from a somatic cell. PSCs can be target cells of the methods described herein.

[0068] By “embryonic stem cell” (ESC) is meant a PSC that was isolated from an embryo, typically from the inner cell mass of the blastocyst. ESC lines are listed in the NIH Human Embryonic Stem Cell Registry, e.g. hESBGN-01, hESBGN-02, hESBGN-03, hESBGN-04 (BresaGen, Inc.); HES-1, HES-2, HES-3, HES-4, HES-5, HES-6 (ES Cell International); Miz-hESI (MizMedi Hospital-Seoul National University); HSF-1, HSF-6 (University of California at San Francisco); and H1, H7, H9, H13, H14 (Wisconsin Alumni Research Foundation (WiCell Research Institute)). Stem cells of interest also include embryonic stem cells from other primates, such as Rhesus stem cells and marmoset stem cells. The stem cells may be obtained from any mammalian species, e.g. human, equine, bovine, porcine, canine, feline, rodent, e.g. mice, rats, hamster, primate, etc. (Thomson et al. (1998) Science 282:1145; Thomson et al. (1995) Proc. Natl. Acad. Sci USA 92:7844; Thomson et al. (1996) Biol. Reprod. 55:254; Shamblott et al., Proc. Natl. Acad. Sci. USA 95:13726, 1998). In culture, ESCs typically grow as flat colonies with large nucleo-cytoplasmic ratios, defined borders and prominent nucleoli. In addition, ESCs express SSEA-3, SSEA-4, TRA-1-60, TRA-1-81, and Alkaline Phosphatase, but not SSEA-1. Examples of methods of generating and characterizing ESCs may be found in, for example, U.S. Pat. Nos. 7,029,913, 5,843,780, and 6,200,806, the disclosures of which are incorporated herein by reference. Methods for proliferating hESCs in the undifferentiated form are described in WO 99/20741, WO 01/51616, and WO 03/020920.

[0069] By “embryonic germ stem cell” (EGSC) or “embryonic germ cell” or “EG cell” is meant a PSC that is derived from germ cells and/or germ cell progenitors, e.g. primordial germ cells, i.e. those that would become sperm and eggs. Embryonic germ cells (EG cells) are thought to have properties similar to embryonic stem cells as described above. Examples of methods of generating and characterizing EG cells may be found in, for example, U.S. Pat. No. 7,153,684; Matsui, Y., et al., (1992) Cell 70:841; Shamblott, M., et al. (2001) Proc. Natl. Acad. Sci. USA 98: 113; Shamblott, M., et al. (1998) Proc. Natl. Acad. Sci. USA, 95:13726; and Koshimizu, U., et al. (1996) Development, 122:1235, the disclosures of which are incorporated herein by reference.

[0070] By “induced pluripotent stem cell” or “iPSC” it is meant a PSC that is derived from a cell that is not a PSC (i.e., from a cell this is differentiated relative to a PSC). iPSCs can be derived from multiple different cell types, including terminally differentiated cells. iPSCs have an ES cell-like morphology, growing as flat colonies with large nucleo-cytoplasmic ratios, defined borders and prominent nuclei. In addition, iPSCs express one or more key pluripotency markers known by one of ordinary skill in the art, including but not limited to Alkaline Phosphatase, SSEA3, SSEA4, Sox2, Oct3/4, Nanog, TRA160, TRA181, TDGF 1, Dnmt3b, FoxD3, GDF3, Cyp26a1, TERT, and zfp42. Examples of methods of generating and characterizing iPSCs may be found in, for example, U.S. Patent Publication Nos. US20090047263, US20090068742, US20090191159, US20090227032, US20090246875, and US20090304646, the disclosures of which are incorporated herein by reference. Generally, to generate iPSCs, somatic cells are provided with reprogramming factors (e.g. Oct4, SOX2, KLF4, MYC, Nanog, Lin28, etc.) known in the art to reprogram the somatic cells to become pluripotent stem cells.

[0071] By “somatic cell” it is meant any cell in an organism that, in the absence of experimental manipulation, does not ordinarily give rise to all types of cells in an organism. In other words, somatic cells are cells that have differentiated sufficiently that they will not naturally generate cells of all three germ layers of the body, i.e. ectoderm, mesoderm and endoderm. For example, somatic cells would include both neurons and neural progenitors, the latter of which may be able to naturally give rise to all or some cell types of the central nervous system but cannot give rise to cells of the mesoderm or endoderm lineages.

[0072] By “mitotic cell” it is meant a cell undergoing mitosis. Mitosis is the process by which a eukaryotic cell separates the chromosomes in its nucleus into two identical sets in two separate nuclei. It is generally followed immediately by cytokinesis, which divides the nuclei, cytoplasm, organelles and cell membrane into two cells containing roughly equal shares of these cellular components.

[0073] By “post-mitotic cell” it is meant a cell that has exited from mitosis, i.e., it is “quiescent”, i.e. it is no longer undergoing divisions. This quiescent state may be temporary, i.e. reversible, or it may be permanent.

[0074] By “meiotic cell” it is meant a cell that is undergoing meiosis. Meiosis is the process by which a cell divides its nuclear material for the purpose of producing gametes or spores. Unlike mitosis, in meiosis, the chromosomes undergo a recombination step which shuffles genetic material between chromosomes. Additionally, the outcome of meiosis is four (genetically unique) haploid cells, as compared with the two (genetically identical) diploid cells produced from mitosis.

[0075] The terms “treatment”, “treating” and the like are used herein to generally mean obtaining a desired pharmacologic and/or physiologic effect. The effect may be prophylactic in terms of completely or partially preventing a disease or symptom thereof and/or may be therapeutic in terms of a partial or complete cure for a disease and/or adverse effect attributable to the disease. “Treatment” as used herein covers any treatment of a disease or symptom in a mammal, and includes: (a) preventing the disease or symptom from occurring in a subject which may be predisposed to acquiring the disease or symptom but has not yet been diagnosed as having it; (b) inhibiting the disease or symptom, i.e., arresting its development; or (c) relieving the disease, i.e., causing regression of the disease. The therapeutic agent may be administered before, during or after the onset of disease or injury. The treatment of ongoing disease, where the treatment stabilizes or reduces the undesirable clinical symptoms of the patient, is of particular interest. Such treatment is desirably performed prior to complete loss of function in the affected tissues. The subject therapy will desirably be administered during the symptomatic stage of the disease, and in some cases after the symptomatic stage of the disease.

[0076] The terms “individual,” “subject,” “host,” and “patient,” are used interchangeably herein and refer to any mammalian subject for whom diagnosis, treatment, or therapy is desired, e.g., humans.

[0077] In some instances, a component (e.g., a nucleic acid component (e.g., a CRISPR/Cas guide RNA); a protein component (e.g., genome editing endonuclease such as a Cas9 protein); and the like) includes a label moiety. The terms “label”, “detectable label”, or “label moiety” as used herein refer to any moiety that provides for signal detection and may vary widely depending on the particular nature of the assay. Label moieties of interest include both directly detectable labels (direct labels)(e.g., a fluorescent label) and indirectly detectable labels (indirect labels)(e.g., a binding pair member). A fluorescent label can be any fluorescent label (e.g., a fluorescent dye (e.g., fluorescein, Texas red, rhodamine, ALEXAFLUOR® labels, and the like), a fluorescent protein (e.g., green fluorescent protein (GFP), enhanced GFP (EGFP), yellow fluorescent protein (YFP), red fluorescent protein (RFP), cyan fluorescent protein (CFP), cherry, tomato, tangerine, and any fluorescent derivative thereof), etc.). Suitable detectable (directly or indirectly) label moieties for use in the methods include any moiety that is detectable by spectroscopic, photochemical, biochemical, immunochemical, electrical, optical, chemical, or other means. For example, suitable indirect labels include biotin (a binding pair member), which can be bound by streptavidin (which can itself be directly or indirectly labeled). Labels can also include: a radiolabel (a direct label)(e.g., ³H, ¹²⁵I, ³⁵S, ¹⁴C, or ³²P); an enzyme (an indirect label)(e.g., peroxidase, alkaline phosphatase, galactosidase, luciferase, glucose oxidase, and the like); a fluorescent protein (a direct label)(e.g., green fluorescent protein, red fluorescent protein, yellow fluorescent protein, and any convenient derivatives thereof); a metal label (a direct label); a colorimetric label; a binding pair member; and the like. By “partner of a binding pair” or “binding pair member” is meant one of a first and a second moiety, wherein the first and the second moiety have a specific binding affinity for each other. Suitable binding pairs include, but are not limited to: antigen/antibodies (for example, digoxigenin/anti-digoxigenin, dinitrophenyl (DNP)/anti-DNP, dansyl-X-anti-dansyl, fluorescein/anti-fluorescein, lucifer yellow/anti-lucifer yellow, and rhodamine anti-rhodamine), biotin/avidin (or biotin/streptavidin) and calmodulin binding protein (CBP)/calmodulin. Any binding pair member can be suitable for use as an indirectly detectable label moiety.

[0078] Any given component, or combination of components can be unlabeled, or can be detectably labeled with a label moiety. In some cases, when two or more components are labeled, they can be labeled with label moieties that are distinguishable from one another.

[0079] General methods in molecular and cellular biochemistry can be found in such standard textbooks as Molecular Cloning: A Laboratory Manual, 3rd Ed. (Sambrook et al., HaRBor Laboratory Press 2001); Short Protocols in Molecular Biology, 4th Ed. (Ausubel et al. eds., John Wiley & Sons 1999); Protein Methods (Bollag et al., John Wiley & Sons 1996); Nonviral Vectors for Gene Therapy (Wagner et al. eds., Academic Press 1999); Viral Vectors (Kaplift & Loewy eds., Academic Press 1995); Immunology Methods Manual (I. Lefkovits ed., Academic Press 1997); and Cell and Tissue Culture: Laboratory Procedures in Biotechnology (Doyle & Griffiths, John Wiley & Sons 1998), the disclosures of which are incorporated herein by reference.

[0080] Before the present invention is further described, it is to be understood that this invention is not limited to particular embodiments described, as such may, of course, vary. It is also to be understood that the terminology used herein is for the purpose of describing particular embodiments only, and is not intended to be limiting, since the scope of the present invention will be limited only by the appended claims.

[0081] Where a range of values is provided, it is understood that each intervening value, to the tenth of the unit of the lower limit unless the context clearly dictates otherwise, between the upper and lower limit of that range and any other stated or intervening value in that stated range, is encompassed within the invention. The upper and lower limits of these smaller ranges may independently be included in the smaller ranges, and are also encompassed within the invention, subject to any specifically excluded limit in the stated range. Where the stated range includes one or both of the limits, ranges excluding either or both of those included limits are also included in the invention.

[0082] Unless defined otherwise, all technical and scientific terms used herein have the same meaning as commonly understood by one of ordinary skill in the art to which this invention belongs. Although any methods and materials similar or equivalent to those described herein can also be used in the practice or testing of the present invention, the preferred methods and materials are now described. All publications mentioned herein are incorporated herein by reference to disclose and describe the methods and/or materials in connection with which the publications are cited.

[0083] It must be noted that as used herein and in the appended claims, the singular forms “a,” “an,” and “the” include plural referents unless the context clearly dictates otherwise. Thus, for example, reference to “a ribonucleoprotein complex” includes a plurality of such complexes and reference to “the mutant dystrophin gene” includes reference to one or more mutant dystrophin genes and equivalents thereof known to those skilled in the art, and so forth. It is further noted that the claims may be drafted to exclude any optional element. As such, this statement is intended to serve as antecedent basis for use of such exclusive terminology as “solely,” “only” and the like in connection with the recitation of claim elements, or use of a “negative” limitation.

[0084] It is appreciated that certain features of the invention, which are, for clarity, described in the context of separate embodiments, may also be provided in combination in a single embodiment. Conversely, various features of the invention, which are, for brevity, described in the context of a single embodiment, may also be provided separately or in any suitable sub-combination. All combinations of the embodiments pertaining to the invention are specifically embraced by the present invention and are disclosed herein just as if each and every combination was individually and explicitly disclosed. In addition, all sub-combinations of the various embodiments and elements thereof are also specifically embraced by the present invention and are disclosed herein just as if each and every such sub-combination was individually and explicitly disclosed herein.

[0085] The publications discussed herein are provided solely for their disclosure prior to the filing date of the present application. Nothing herein is to be construed as an admission that the present invention is not entitled to antedate such publication by virtue of prior invention. Further, the dates of publication provided may be different from the actual publication dates which may need to be independently confirmed.

### DETAILED DESCRIPTION

[0086] The present disclosure provides a method of modifying a mutant dystrophin gene in the genome of a cell. The present disclosure further provides compositions and kits for modifying a mutant dystrophin gene in the genome of a cell.

### Compositions, Kits, and Methods

[0087] Provided is a method that includes modifying a mutant dystrophin gene in the genome of a cell (e.g., a human cell). In some cases, the method includes introducing into the cell: (a) a class 2 CRISPR/Cas endonuclease (e.g., a Cas9 protein), or a nucleic acid comprising a nucleotide sequence encoding the class 2 CRISPR/Cas endonuclease; and (b) first and second CRISPR/Cas guide RNAs corresponding to the class 2 CRISPR/Cas endonuclease, or one or more nucleic acids comprising nucleotide sequences encoding the first and second CRISPR/Cas guide RNAs. The first CRISPR/Cas guide RNA comprises a guide sequence that hybridizes to a target sequence within intron 44 of the mutant dystrophin gene, and the second CRISPR/Cas guide RNA comprises a guide sequence that hybridizes to a target sequence within intron 55 of the mutant dystrophin gene. The step of introducing results in deletion of a greater than 330-kilobase region of the mutant dystrophin gene comprising exons 45-55 (e.g., in some cases due to non-homologous end-joining (NHEJ)).

[0088] Thus, in some cases, the subject methods result in cleavage of the cell's genome in introns 44 and 55 of the mutant dystrophin gene and deletion of a greater than 330-kilobase region of the mutant dystrophin gene comprising exons 45-55. The subject methods thus results in deletion of a greater than 330-kilobase region of the mutant dystrophin gene, where the deleted region comprises exons 45-55 (e.g., such that the remaining sequence encode a dystrophin mRNA missing exons 45-55, e.g., remaining sequence of intron 44 and remaining sequence of intron 55 become a single intron, and exon 44 is therefore spliced directly to exon 56). Thus, in some cases, the deleted region includes intron sequence and the remaining sequence also includes intron sequence.

[0089] In some cases, the subject methods result in a genomic deletion of greater than 330 kilobases (kb). In some cases, the subject methods result in a genomic deletion of 400 kilobases (kb) or more (e.g., 450 kb or more, 500 kb or more, 550 kb or more, 600 kb or more, 650 kb or more, 700 kb or more, etc.). For example, in some cases, the target sequence within intron 44 and the target sequence within intron 55 are separated from each other by greater than 330 kilobases (kb). In some cases, the target sequence within intron 44 and the target sequence within intron 55 are separated from each other by 400 kb or more (e.g., 450 kb or more, 500 kb or more, 550 kb or more, 600 kb or more, 650 kb or more, 700 kb or more, etc.). In some cases, the target sequence within intron 44 and the target sequence within intron 55 are separated from each other by 700 kb or more.

[0090] Thus, in some cases, the guide sequence of the first CRISPR/Cas guide RNA (e.g., a Cas9 guide RNA) has 100% complementarity over 20 contiguous nucleotides with a target sequence corresponding to intron 44 of the human dystrophin gene (e.g., a target sequence within intron 44 of the human dystrophin gene, a target sequence within a mouse dystrophin gene, etc.), and the guide sequence of the second CRISPR/Cas guide RNA (e.g., a Cas9 guide RNA) has 100% complementarity over 20 contiguous nucleotides with a target sequence corresponding to intron 55 of the human dystrophin gene (e.g., a target sequence within intron 55 of the human dystrophin gene, a target sequence within a mouse dystrophin gene, etc.). In some such cases, the target sequence corresponding to intron 44 and the target sequence corresponding to intron 55 are separated from each other by greater than 330 kilobases (kb). In some cases, the target sequence corresponding to intron 44 and the target sequence corresponding to intron 55 are separated from each other by 400 kilobases (kb) or more (e.g., 450 kb or more, 500 kb or more, 550 kb or more, 600 kb or more, 650 kb or more, 700 kb or more, etc.). In some cases, the target sequence within intron 44 and the target sequence within intron 55 are separated from each other by 700 kb or more.

[0091] Examples guide RNAs (e.g., guide sequences of guide RNAs) and target sequences that can be used to accomplish such genomic deletions in human cells are provided in Table 2 (provided in FIG. 23) and Table 9 (provided in FIG. 24).

[0092] For the subject compositions, kits, and methods the components (e.g., (a) a class 2 CRISPR/Cas endonuclease, e.g., Cas9, Cpf1, etc.; and/or (b) first and second corresponding guide RNAs, e.g., Cas9 guide RNAs, a Cpf1 guide RNAs, etc.) can be delivered to a cell (introduced into a cell) as DNA, RNA, or protein. For example, when a subject composition, kit, and/or method includes a class 2 CRISPR/Cas endonuclease (e.g., Cas9, Cpf1, etc.) and corresponding guide RNAs (e.g., Cas9 guide RNAs, Cpf1 guide RNAs, etc.), the endonuclease and guide RNAs can be delivered (introduced into the cell) as an RNP complex (i.e., a pre-assembled complexes of the CRISPR/Cas endonuclease and the corresponding CRISPR/Cas guide RNAs). Thus, a class 2 CRISPR/Cas endonuclease (e.g., Cas9) can be introduced into a cell as a protein. A class 2 CRISPR/Cas endonuclease (e.g., Cas9) can also be introduced into a cell as a nucleic acid (DNA and/or RNA) encoding the endonuclease. A CRISPR/Cas guide RNA can be introduced into a cell as RNA, or as DNA encoding the guide RNA.

[0093] In some cases, a class 2 CRISPR/Cas endonuclease (e.g., a Cas9 protein) is a fusion protein that is fused to a heterologous polypeptide (also referred to as a “fusion partner”). In some cases, a class 2 CRISPR/Cas endonuclease is fused to an amino acid sequence (a fusion partner) that provides for subcellular localization, i.e., the fusion partner is a subcellular localization sequence (e.g., one or more nuclear localization signals (NLSs) for targeting to the nucleus, two or more NLSs, three or more NLSs, etc.). In some embodiments, a class 2 CRISPR/Cas endonuclease is fused to an amino acid sequence (a fusion partner) that provides a tag (i.e., the fusion partner is a detectable label) for ease of tracking and/or purification (e.g., a fluorescent protein, e.g., green fluorescent protein (GFP), YFP, RFP, CFP, mCherry, tdTomato, and the like; a histidine tag, e.g., a 6×His tag; a hemagglutinin (HA) tag; a FLAG tag; a Myc tag; and the like). In some embodiments, the fusion partner can provide for increased or decreased stability (i.e., the fusion partner can be a stability control peptide, e.g., a degron, which in some cases is controllable (e.g., a temperature sensitive or drug controllable degron sequence).

[0094] In some cases, a class 2 CRISPR/Cas endonuclease is conjugated (e.g., fused) to a polypeptide permeant domain to promote uptake by the cell (i.e., the fusion partner promotes uptake by a cell). A number of permeant domains are known in the art and may be used, including peptides, peptidomimetics, and non-peptide carriers. For example, a permeant peptide may be derived from the third alpha helix of Drosophila melanogaster transcription factor Antennapaedia, referred to as penetratin, which comprises the amino acid sequence RQIKIWFQNRRMKWKK (SEQ ID NO: 1080). As another example, the permeant peptide can comprise the HIV-1 tat basic region amino acid sequence, which may include, for example, amino acids 49-57 of naturally-occurring tat protein. Other permeant domains include poly-arginine motifs, for example, the region of amino acids 34-56 of HIV-1 rev protein, nona-arginine, octa-arginine, and the like. (See, for example, Futaki et al. (2003) Curr Protein Pept Sci. 2003 April; 4(2): 87-9 and 446; and Wender et al. (2000) Proc. Natl. Acad. Sci. U.S.A 2000 Nov. 21; 97(24):13003-8; published U.S. Patent applications 20030220334; 20030083256; 20030032593; and 20030022831, herein specifically incorporated by reference for the teachings of translocation peptides and peptoids). The nona-arginine (R9) sequence is one of the more efficient PTDs that have been characterized (Wender et al. 2000; Uemura et al. 2002). The site at which the fusion is made may be selected in order to optimize the biological activity, secretion or binding characteristics of the polypeptide. The optimal site can be determined by routine experimentation.

[0095] In some cases, a class 2 CRISPR/Cas endonuclease includes a “Protein Transduction Domain” or PTD (also known as a CPP—cell penetrating peptide), which refers to a polypeptide, polynucleotide, carbohydrate, or organic or inorganic compound that facilitates traversing a lipid bilayer, micelle, cell membrane, organelle membrane, or vesicle membrane. A PTD attached to another molecule, which can range from a small polar molecule to a large macromolecule and/or a nanoparticle, facilitates the molecule traversing a membrane, for example going from extracellular space to intracellular space, or cytosol to within an organelle. In some embodiments, a PTD is covalently linked to the amino terminus a polypeptide (e.g., a class 2 CRISPR/Cas endonuclease, e.g., a Cas9 protein). In some embodiments, a PTD is covalently linked to the carboxyl terminus of a polypeptide (e.g., a class 2 CRISPR/Cas endonuclease, e.g., a Cas9 protein). In some cases, the PTD is inserted internally in the class 2 CRISPR/Cas endonuclease (e.g., Cas9 protein) (i.e., is not at the N- or C-terminus of the class 2 CRISPR/Cas endonuclease). In some cases, a subject class 2 CRISPR/Cas endonuclease (e.g., Cas9 protein) includes (is conjugated to, is fused to) one or more PTDs (e.g., two or more, three or more, four or more PTDs). In some cases a PTD includes a nuclear localization signal (NLS) (e.g, in some cases 2 or more, 3 or more, 4 or more, or 5 or more NLSs).

[0096] In some cases, a class 2 CRISPR/Cas endonuclease (e.g., Cas9 protein) includes one or more NLSs (e.g., 2 or more, 3 or more, 4 or more, or 5 or more NLSs). In some embodiments, a PTD is covalently linked to a nucleic acid (e.g., a CRISPR/Cas guide RNA, a polynucleotide encoding a CRISPR/Cas guide RNA, a polynucleotide encoding a class 2 CRISPR/Cas endonuclease such as a Cas9 protein or a type V or type VI CRISPR/Cas protein, etc.). Examples of PTDs include but are not limited to a minimal undecapeptide protein transduction domain (corresponding to residues 47-57 of HIV-1 TAT comprising YGRKKRRQRRR; SEQ ID NO: 1076); a polyarginine sequence comprising a number of arginines sufficient to direct entry into a cell (e.g., 3, 4, 5, 6, 7, 8, 9, 10, or 10-50 arginines); a VP22 domain (Zender et al. (2002) Cancer Gene Ther. 9(6):489-96); an Drosophila Antennapedia protein transduction domain (Noguchi et al. (2003) Diabetes 52(7):1732-1737); a truncated human calcitonin peptide (Trehin et al. (2004) Pharm. Research 21:1248-1256); polylysine (Wender et al. (2000) Proc. Natl. Acad. Sci. USA 97:13003-13008); RRQRRTSKLMKR (SEQ ID NO: 1077); Transportan GWTLNSAGYLLGKINLKALAALAKKIL (SEQ ID NO: 1078); KALAWEAKLAKALAKALAKHLAKALAKALKCEA (SEQ ID NO: 1079); and RQIKIWFQNRRMKWKK (SEQ ID NO: 1080). Exemplary PTDs include but are not limited to, YGRKKRRQRRR (SEQ ID NO:1081), RKKRRQRRR (SEQ ID NO: 1082); an arginine homopolymer of from 3 arginine residues to 50 arginine residues; Exemplary PTD domain amino acid sequences include, but are not limited to, any of the following: YGRKKRRQRRR (SEQ ID NO: 1083); RKKRRQRR (SEQ ID NO: 1084); YARAAARQARA (SEQ ID NO: 1085); THRLPRRRRRR (SEQ ID NO: 1086); and GGRRARRRRRR (SEQ ID NO: 1087). In some embodiments, the PTD is an activatable CPP (ACPP) (Aguilera et al. (2009) Integr Biol (Camb) June; 1(5-6): 371-381). ACPPs comprise a polycationic CPP (e.g., Arg9 or “R9”) connected via a cleavable linker to a matching polyanion (e.g., Glu9 or “E9”), which reduces the net charge to nearly zero and thereby inhibits adhesion and uptake into cells. Upon cleavage of the linker, the polyanion is released, locally unmasking the polyarginine and its inherent adhesiveness, thus “activating” the ACPP to traverse the membrane.

[0097] A class 2 CRISPR/Cas endonuclease (e.g., Cas9 protein) can have multiple (1 or more, 2 or more, 3 or more, etc.) fusion partners in any combination of the above. As an illustrative example, a class 2 CRISPR/Cas endonuclease (e.g., Cas9 protein) can have a fusion partner that provides for tagging (e.g., GFP), and can also have a subcellular localization sequence (e.g., one or more NLSs). In some cases, such a fusion protein might also have a tag for ease of tracking and/or purification (e.g., a histidine tag, e.g., a 6×His tag; a hemagglutinin (HA) tag; a FLAG tag; a Myc tag; and the like). As another illustrative example, class 2 CRISPR/Cas endonuclease (e.g., Cas9 protein) can have one or more NLSs (e.g., two or more, three or more, four or more, five or more, 1, 2, 3, 4, or 5 NLSs). In some cases a fusion partner (or multiple fusion partners, e.g., 1, 2, 3, 4, or 5 NLSs) (e.g., an NLS, a tag, a fusion partner providing an activity, etc.) is located at or near the C-terminus of the class 2 CRISPR/Cas endonuclease (e.g., Cas9 protein). In some cases a fusion partner (or multiple fusion partners, e.g., 1, 2, 3, 4, or 5 NLSs) (e.g., an NLS, a tag, a fusion partner providing an activity, etc.) is located at the N-terminus of the class 2 CRISPR/Cas endonuclease (e.g., Cas9 protein). In some cases the class 2 CRISPR/Cas endonuclease (e.g., Cas9 protein) has a fusion partner (or multiple fusion partners, e.g., 1, 2, 3, 4, or 5 NLSs)(e.g., an NLS, a tag, a fusion partner providing an activity, etc.) at both the N-terminus and C-terminus.

### Class 2 CRISPR Cas Endonucleases

[0098] RNA-mediated adaptive immune systems in bacteria and archaea rely on Clustered Regularly Interspaced Short Palindromic Repeat (CRISPR) genomic loci and CRISPR-associated (Cas) proteins that function together to provide protection from invading viruses and plasmids. In some embodiments, a subject method, composition, and/or kit includes a class 2 CRISPR/Cas endonuclease. In class 2 CRISPR systems, the functions of the effector complex (e.g., the cleavage of target DNA) are carried out by a single endonuclease (e.g., see Zetsche et al., Cell. 2015 Oct. 22; 163(3):759-71; Makarova et al., Nat Rev Microbiol. 2015 November; 13(11):722-36; and Shmakov et al., Mol Cell. 2015 Nov. 5; 60(3):385-97). As such, the term “class 2 CRISPR/Cas protein” is used herein to encompass the endonuclease (the target nucleic acid cleaving protein) from class 2 CRISPR systems. Thus, the term “class 2 CRISPR/Cas endonuclease” as used herein encompasses type II CRISPR/Cas proteins (e.g., Cas9), type V CRISPR/Cas proteins (e.g., Cpf1, C2c1, C2C3), and type VI CRISPR/Cas proteins (e.g., C2c2). To date, class 2 CRISPR/Cas proteins encompass type II, type V, and type VI CRISPR/Cas proteins, but the term is also meant to encompass any class 2 CRISPR/Cas protein suitable for binding to a corresponding guide RNA and forming an RNP complex (e.g., and cleaving target DNA).

### Type II CRISPR Cas Endonucleases (e.g., Cas 9)

[0099] In natural Type II CRISPR/Cas systems, Cas9 functions as an RNA-guided endonuclease that uses a dual-guide RNA having a crRNA and trans-activating crRNA (tracrRNA) for target recognition and cleavage by a mechanism involving two nuclease active sites in Cas9 that together generate double-stranded DNA breaks (DSBs), or can individually generate single-stranded DNA breaks (SSBs). The Type II CRISPR endonuclease Cas9 and engineered dual- (dgRNA) or single guide RNA (sgRNA) form a ribonucleoprotein (RNP) complex that can be targeted to a desired DNA sequence. Guided by a dual-RNA complex or a chimeric single-guide RNA, Cas9 generates site-specific DSBs or SSBs within double-stranded DNA (dsDNA) target nucleic acids, which are repaired either by non-homologous end joining (NHEJ) or homology-directed recombination (HDR).

[0100] In some cases, a subject method, composition, and/or kit includes a type II CRISPR/Cas endonuclease. A type II CRISPR/Cas endonuclease is a type of class 2 CRISPR/Cas endonuclease. In some cases, the type II CRISPR/Cas endonuclease is a Cas9 protein. A Cas9 protein forms a complex with a Cas9 guide RNA. The guide RNA provides target specificity to a Cas9-guide RNA complex by having a nucleotide sequence (a guide sequence) that is complementary to a sequence (the target site) of a target nucleic acid (as described elsewhere herein). The Cas9 protein of the complex provides the site-specific activity. In other words, the Cas9 protein is guided to a target site (e.g., stabilized at a target site) within a target nucleic acid sequence (e.g. genomic DNA) by virtue of its association with the protein-binding segment of the Cas9 guide RNA.

[0101] In some cases, the CRIPR/Cas endonuclease (e.g., Cas9 protein) is a naturally-occurring protein (e.g., naturally occurs in bacterial and/or archaeal cells). In other cases, the CRIPR/Cas endonuclease (e.g., Cas9 protein) is not a naturally-occurring polypeptide (e.g., the CRIPR/Cas endonuclease is a variant CRIPR/Cas endonuclease, a chimeric protein, and the like, e.g., in some cases the CRIPR/Cas endonuclease includes one or more NLSs).

[0102] Examples of suitable Cas9 proteins include, but are not limited to, those set forth in SEQ ID NOs: 5-816. Naturally occurring Cas9 proteins bind a Cas9 guide RNA, are thereby directed to a specific sequence within a target nucleic acid (a target site), and cleave the target nucleic acid (e.g., cleave dsDNA to generate a double strand break). A chimeric Cas9 protein is a fusion protein comprising a Cas9 polypeptide that is fused to a heterologous protein (referred to as a fusion partner), where the heterologous protein provides an activity (e.g., one that is not provided by the Cas9 protein). The fusion partner can provide an activity, e.g., enzymatic activity (e.g., nuclease activity, activity for DNA and/or RNA methylation, activity for DNA and/or RNA cleavage, activity for histone acetylation, activity for histone methylation, activity for RNA modification, activity for RNA-binding, activity for RNA splicing etc.). In some cases a portion of the Cas9 protein (e.g., the RuvC domain and/or the HNH domain) exhibits reduced nuclease activity relative to the corresponding portion of a wild type Cas9 protein (e.g., in some cases the Cas9 protein is a nickase). In some cases, the Cas9 protein is enzymatically inactive, or has reduced enzymatic activity relative to a wild-type Cas9 protein (e.g., relative to Streptococcus pyogenes Cas9).

[0103] Assays to determine whether given protein interacts with a Cas9 guide RNA can be any convenient binding assay that tests for binding between a protein and a nucleic acid. Suitable binding assays (e.g., gel shift assays) will be known to one of ordinary skill in the art (e.g., assays that include adding a Cas9 guide RNA and a protein to a target nucleic acid).

[0104] Assays to determine whether a protein has an activity (e.g., to determine if the protein has nuclease activity that cleaves a target nucleic acid and/or some heterologous activity) can be any convenient assay (e.g., any convenient nucleic acid cleavage assay that tests for nucleic acid cleavage). Suitable assays (e.g., cleavage assays) will be known to one of ordinary skill in the art and can include adding a Cas9 guide RNA and a protein to a target nucleic acid.

[0105] In some cases, a chimeric Cas9 protein includes a heterologous polypeptide that has enzymatic activity that modifies target nucleic acid (e.g., nuclease activity, methyltransferase activity, demethylase activity, DNA repair activity, DNA damage activity, deamination activity, dismutase activity, alkylation activity, depurination activity, oxidation activity, pyrimidine dimer forming activity, integrase activity, transposase activity, recombinase activity, polymerase activity, ligase activity, helicase activity, photolyase activity or glycosylase activity).

[0106] In some cases, a chimeric Cas9 protein includes a heterologous polypeptide that has enzymatic activity that modifies a polypeptide (e.g., a histone) associated with target nucleic acid (e.g., methyltransferase activity, demethylase activity, acetyltransferase activity, deacetylase activity, kinase activity, phosphatase activity, ubiquitin ligase activity, deubiquitinating activity, adenylation activity, deadenylation activity, SUMOylating activity, deSUMOylating activity, ribosylation activity, deribosylation activity, myristoylation activity or demyristoylation activity).

[0107] In some cases, a CRISPR/Cas endonuclease (e.g., a Cas9 protein) includes a heterologous polypeptide that provides for localization within the cell. For example, in some cases, a subject CRISPR/Cas endonuclease (e.g., a Cas9 protein) includes one or more (e.g., 2 or more, 3 or more, 4 or more, 5 or more, etc.) nuclear localization sequences (NLSs). The one or more (e.g., 2 or more, 3 or more, 4 or more, 5 or more, etc.) NLSs can be at any convenient position within the CRISPR/Cas endonuclease (e.g., a Cas9 protein), e.g., N-terminus, C-terminus, internal, etc. In some cases, a CRISPR/Cas endonuclease (e.g., a Cas9 protein) includes one or more (e.g., 2 or more, 3 or more, 4 or more, 5 or more, etc.) NLSs at the N-terminus and one or more (e.g., 2 or more, 3 or more, 4 or more, 5 or more, etc.) NLSs at the C-terminus.

[0108] Many Cas9 orthologs from a wide variety of species have been identified and in some cases the proteins share only a few identical amino acids. Identified Cas9 orthologs have similar domain architecture with a central HNH endonuclease domain and a split RuvC/RNaseH domain (e.g., RuvCI, RuvCII, and RuvCIII) (e.g., see Table 1). For example, a Cas9 protein can have 3 different regions (sometimes referred to as RuvC-I, RuvC-II, and RucC-III), that are not contiguous with respect to the primary amino acid sequence of the Cas9 protein, but fold together to form a RuvC domain once the protein is produced and folds. Thus, Cas9 proteins can be said to share at least 4 key motifs with a conserved architecture. Motifs 1, 2, and 4 are RuvC like motifs while motif 3 is an HNH-motif. The motifs set forth in Table 1 may not represent the entire RuvC-like and/or HNH domains as accepted in the art, but Table 1 does present motifs that can be used to help determine whether a given protein is a Cas9 protein.

TABLE 1
Table 1 lists 4 motifs that are present in Cas9 sequences
from various species.
The amino acids listed in Table 1 are from the Cas9 from
S. pyogenes (SEQ ID NO: 5).

| Motif # | Motif | Amino acids (residue #s) | Highly conserved |
|---|---|---|---|
| 1 | RuvC-like I | IGLDIGTNSVGWAVI (7-21) | D10, G12, G17 |
| | | (SEQ ID NO: 1) | |
| 2 | RuvC-like II | IVIEMARE (759-766) | E762 |
| | | (SEQ ID NO: 2) | |
| 3 | HNH-motif | DVDHIVPQSFLKDDSIDNKVLTRSDK | H840, N854, N863 |
| | | N (837-863) (SEQ ID NO: 3) | |
| 4 | RuvC-like | HHAHDAYL (982-989) | H982, H983, A984, |
| | III | (SEQ ID NO: 4) | D986, A987 |

[0109] In some cases, a suitable Cas9 protein comprises an amino acid sequence having 4 motifs, each of motifs 1-4 having 60% or more, 70% or more, 75% or more, 80% or more, 85% or more, 90% or more, 95% or more, 99% or more or 100% amino acid sequence identity to motifs 1-4 as set forth in SEQ ID NOs: 1-4, respectively (e.g., see Table 1), or to the corresponding portions in any of the amino acid sequences set forth in SEQ ID NOs: 5-816.

[0110] In other words, in some cases, a suitable Cas9 polypeptide comprises an amino acid sequence having 4 motifs, each of motifs 1-4 having 60% or more, 70% or more, 75% or more, 80% or more, 85% or more, 90% or more, 95% or more, 99% or more or 100% amino acid sequence identity to motifs 1-4 of the Cas9 amino acid sequence set forth in SEQ ID NO: 5 (e.g., the sequences set forth in SEQ ID NOs: 1-4, e.g., see Table 1), or to the corresponding portions in any of the amino acid sequences set forth in SEQ ID NOs: 6-816.

[0111] In some cases, a suitable Cas9 protein comprises an amino acid sequence having 4 motifs, each of motifs 1-4 having 60% or more amino acid sequence identity to motifs 1-4 of the Cas9 amino acid sequence set forth as SEQ ID NO: 5 (the motifs are in Table 1, and are set forth as SEQ ID NOs: 1-4, respectively), or to the corresponding portions in any of the amino acid sequences set forth in SEQ ID NOs: 6-816. In some cases, a suitable Cas9 protein comprises an amino acid sequence having 4 motifs, each of motifs 1-4 having 70% or more amino acid sequence identity to motifs 1-4 of the Cas9 amino acid sequence set forth as SEQ ID NO: 5 (the motifs are in Table 1, and are set forth as SEQ ID NOs: 1-4, respectively), or to the corresponding portions in any of the amino acid sequences set forth in SEQ ID NOs: 6-816. In some cases, a suitable Cas9 protein comprises an amino acid sequence having 4 motifs, each of motifs 1-4 having 75% or more amino acid sequence identity to motifs 1-4 of the Cas9 amino acid sequence set forth as SEQ ID NO: 5 (the motifs are in Table 1, and are set forth as SEQ ID NOs: 1-4, respectively), or to the corresponding portions in any of the amino acid sequences set forth in SEQ ID NOs: 6-816. In some cases, a suitable Cas9 protein comprises an amino acid sequence having 4 motifs, each of motifs 1-4 having 80% or more amino acid sequence identity to motifs 1-4 of the Cas9 amino acid sequence set forth as SEQ ID NO: 5 (the motifs are in Table 1, and are set forth as SEQ ID NOs: 1-4, respectively), or to the corresponding portions in any of the amino acid sequences set forth in SEQ ID NOs: 6-816. In some cases, a suitable Cas9 protein comprises an amino acid sequence having 4 motifs, each of motifs 1-4 having 85% or more amino acid sequence identity to motifs 1-4 of the Cas9 amino acid sequence set forth as SEQ ID NO: 5 (the motifs are in Table 1, and are set forth as SEQ ID NOs: 1-4, respectively), or to the corresponding portions in any of the amino acid sequences set forth in SEQ ID NOs: 6-816. In some cases, a suitable Cas9 protein comprises an amino acid sequence having 4 motifs, each of motifs 1-4 having 90% or more amino acid sequence identity to motifs 1-4 of the Cas9 amino acid sequence set forth as SEQ ID NO: 5 (the motifs are in Table 1, and are set forth as SEQ ID NOs: 1-4, respectively), or to the corresponding portions in any of the amino acid sequences set forth in SEQ ID NOs: 6-816. In some cases, a suitable Cas9 protein comprises an amino acid sequence having 4 motifs, each of motifs 1-4 having 95% or more amino acid sequence identity to motifs 1-4 of the Cas9 amino acid sequence set forth as SEQ ID NO: 5 (the motifs are in Table 1, and are set forth as SEQ ID NOs: 1-4, respectively), or to the corresponding portions in any of the amino acid sequences set forth in SEQ ID NOs: 6-816. In some cases, a suitable Cas9 protein comprises an amino acid sequence having 4 motifs, each of motifs 1-4 having 99% or more amino acid sequence identity to motifs 1-4 of the Cas9 amino acid sequence set forth as SEQ ID NO: 5 (the motifs are in Table 1, and are set forth as SEQ ID NOs: 1-4, respectively), or to the corresponding portions in any of the amino acid sequences set forth in SEQ ID NOs: 6-816. In some cases, a suitable Cas9 protein comprises an amino acid sequence having 4 motifs, each of motifs 1-4 having 100% amino acid sequence identity to motifs 1-4 of the Cas9 amino acid sequence set forth as SEQ ID NO: 5 (the motifs are in Table 1, and are set forth as SEQ ID NOs: 1-4, respectively), or to the corresponding portions in any of the amino acid sequences set forth in SEQ ID NOs: 6-816. Any Cas9 protein as defined above can be used as a Cas9 polypeptide, as part of a chimeric Cas9 polypeptide (e.g., a Cas9 fusion protein), any of which can be used in an RNP of the present disclosure.

[0112] In some cases, a suitable Cas9 protein comprises an amino acid sequence having 60% or more, 70% or more, 75% or more, 80% or more, 85% or more, 90% or more, 95% or more, 99% or more or 100% amino acid sequence identity to amino acids 7-166 or 731-1003 of the Cas9 amino acid sequence set forth in SEQ ID NO: 5, or to the corresponding portions in any of the amino acid sequences set forth as SEQ ID NOs: 6-816.

[0113] In some cases, a suitable Cas9 protein comprises an amino acid sequence having 60% or more amino acid sequence identity to amino acids 7-166 or 731-1003 of the Cas9 amino acid sequence set forth in SEQ ID NO: 5, or to the corresponding portions in any of the amino acid sequences set forth as SEQ ID NOs: 6-816. In some cases, a suitable Cas9 protein comprises an amino acid sequence having 70% or more amino acid sequence identity to amino acids 7-166 or 731-1003 of the Cas9 amino acid sequence set forth in SEQ ID NO: 5, or to the corresponding portions in any of the amino acid sequences set forth as SEQ ID NOs: 6-816. In some cases, a suitable Cas9 protein comprises an amino acid sequence having 75% or more amino acid sequence identity to amino acids 7-166 or 731-1003 of the Cas9 amino acid sequence set forth in SEQ ID NO: 5, or to the corresponding portions in any of the amino acid sequences set forth as SEQ ID NOs: 6-816. In some cases, a suitable Cas9 protein comprises an amino acid sequence having 80% or more amino acid sequence identity to amino acids 7-166 or 731-1003 of the Cas9 amino acid sequence set forth in SEQ ID NO: 5, or to the corresponding portions in any of the amino acid sequences set forth as SEQ ID NOs: 6-816. In some cases, a suitable Cas9 protein comprises an amino acid sequence having 85% or more amino acid sequence identity to amino acids 7-166 or 731-1003 of the Cas9 amino acid sequence set forth in SEQ ID NO: 5, or to the corresponding portions in any of the amino acid sequences set forth as SEQ ID NOs: 6-816. In some cases, a suitable Cas9 protein comprises an amino acid sequence having 90% or more amino acid sequence identity to amino acids 7-166 or 731-1003 of the Cas9 amino acid sequence set forth in SEQ ID NO: 5, or to the corresponding portions in any of the amino acid sequences set forth as SEQ ID NOs: 6-816. In some cases, a suitable Cas9 protein comprises an amino acid sequence having 95% or more amino acid sequence identity to amino acids 7-166 or 731-1003 of the Cas9 amino acid sequence set forth in SEQ ID NO: 5, or to the corresponding portions in any of the amino acid sequences set forth as SEQ ID NOs: 6-816. In some cases, a suitable Cas9 protein comprises an amino acid sequence having 99% or more amino acid sequence identity to amino acids 7-166 or 731-1003 of the Cas9 amino acid sequence set forth in SEQ ID NO: 5, or to the corresponding portions in any of the amino acid sequences set forth as SEQ ID NOs: 6-816. In some cases, a suitable Cas9 protein comprises an amino acid sequence having 100% amino acid sequence identity to amino acids 7-166 or 731-1003 of the Cas9 amino acid sequence set forth in SEQ ID NO: 5, or to the corresponding portions in any of the amino acid sequences set forth as SEQ ID NOs: 6-816. Any Cas9 protein as defined above can be used as a Cas9 polypeptide, as part of a chimeric Cas9 polypeptide (e.g., a Cas9 fusion protein), any of which can be used in an RNP of the present disclosure.

[0114] In some cases, a suitable Cas9 protein comprises an amino acid sequence having 60% or more, 70% or more, 75% or more, 80% or more, 85% or more, 90% or more, 95% or more, 99% or more or 100% amino acid sequence identity to the Cas9 amino acid sequence set forth in SEQ ID NO: 5, or to any of the amino acid sequences set forth as SEQ ID NOs: 6-816.

[0115] In some cases, a suitable Cas9 protein comprises an amino acid sequence having 60% or more amino acid sequence identity to the Cas9 amino acid sequence set forth in SEQ ID NO: 5, or to any of the amino acid sequences set forth as SEQ ID NOs: 6-816. In some cases, a suitable Cas9 protein comprises an amino acid sequence having 70% or more amino acid sequence identity to the Cas9 amino acid sequence set forth in SEQ ID NO: 5, or to any of the amino acid sequences set forth as SEQ ID NOs: 6-816. In some cases, a suitable Cas9 protein comprises an amino acid sequence having 75% or more amino acid sequence identity to the Cas9 amino acid sequence set forth in SEQ ID NO: 5, or to any of the amino acid sequences set forth as SEQ ID NOs: 6-816. In some cases, a suitable Cas9 protein comprises an amino acid sequence having 80% or more amino acid sequence identity to the Cas9 amino acid sequence set forth in SEQ ID NO: 5, or to any of the amino acid sequences set forth as SEQ ID NOs: 6-816. In some cases, a suitable Cas9 protein comprises an amino acid sequence having 85% or more amino acid sequence identity to the Cas9 amino acid sequence set forth in SEQ ID NO: 5, or to any of the amino acid sequences set forth as SEQ ID NOs: 6-816. In some cases, a suitable Cas9 protein comprises an amino acid sequence having 90% or more amino acid sequence identity to the Cas9 amino acid sequence set forth in SEQ ID NO: 5, or to any of the amino acid sequences set forth as SEQ ID NOs: 6-816. In some cases, a suitable Cas9 protein comprises an amino acid sequence having 95% or more amino acid sequence identity to the Cas9 amino acid sequence set forth in SEQ ID NO: 5, or to any of the amino acid sequences set forth as SEQ ID NOs: 6-816. In some cases, a suitable Cas9 protein comprises an amino acid sequence having 99% or more amino acid sequence identity to the Cas9 amino acid sequence set forth in SEQ ID NO: 5, or to any of the amino acid sequences set forth as SEQ ID NOs: 6-816. In some cases, a suitable Cas9 protein comprises an amino acid sequence having 100% amino acid sequence identity to the Cas9 amino acid sequence set forth in SEQ ID NO: 5, or to any of the amino acid sequences set forth as SEQ ID NOs: 6-816. Any Cas9 protein as defined above can be used as a Cas9 polypeptide, as part of a chimeric Cas9 polypeptide (e.g., a Cas9 fusion protein), any of which can be used in an RNP of the present disclosure.

[0116] In some cases, a Cas9 protein comprises 4 motifs (as listed in Table 1), at least one with (or each with) amino acid sequences having 75% or more, 80% or more, 85% or more, 90% or more, 95% or more, 99% or more or 100% amino acid sequence identity to each of the 4 motifs listed in Table 1 (SEQ ID NOs:1-4), or to the corresponding portions in any of the amino acid sequences set forth as SEQ ID NOs: 6-816.

[0117] In some cases, a Cas9 protein is a high fidelity Cas9 protein (e.g., see Kleinstiver et al., Nature. 2016 Jan. 28; 529(7587):490-5).

[0118] In some cases, a suitable Cas9 protein is a Cas9 protein as described in Slaymaker et al. (2016) Science 351:84. For example, a suitable Cas9 protein includes a Streptococcus pyogenes Cas9 with substitutions of one or more of K810, K848, K855, K1003, and R1060 (where the amino acid numbering is based on the numbering set out in SEQ ID NO:5). For example, a suitable Cas9 protein includes a Streptococcus pyogenes Cas9 with K810A, K1003A, and R1060A substitutions (where the amino acid numbering is based on the numbering set out in SEQ ID NO:5). As another example, a suitable Cas9 protein includes a Streptococcus pyogenes Cas9 with K848A, K1003A, and R1060A substitutions (where the amino acid numbering is based on the numbering set out in SEQ ID NO:5). As another example, a suitable Cas9 protein includes a Streptococcus pyogenes Cas9 with a K855A substitution (where the amino acid numbering is based on the numbering set out in SEQ ID NO:5).

### Type V and Type VI CRISPR Cas Endonucleases

[0119] In some cases, a subject method, composition, and/or kit includes a type V or type VI CRISPR/Cas endonuclease (e.g., Cpf1, C2c1, C2c2, C2c3). Type V and type VI CRISPR/Cas endonucleases are a type of class 2 CRISPR/Cas endonuclease. Examples of type V CRISPR/Cas endonucleases include but are not limited to: Cpf1, C2c1, and C2c3. An example of a type VI CRISPR/Cas endonuclease is C2c2. In some cases a subject method, composition, and/or kit includes a type V CRISPR/Cas endonuclease (e.g., Cpf1, C2c1, C2c3). In some cases, a Type V CRISPR/Cas endonuclease is a Cpf1 protein. In some cases, a subject method, composition, and/or kit includes a type VI CRISPR/Cas endonuclease (e.g., C2c2).

[0120] Like type II CRISPR/Cas endonucleases, type V and VI CRISPR/Cas endonucleases form a complex with a corresponding guide RNA. The guide RNA provides target specificity to an endonuclease-guide RNA RNP complex by having a nucleotide sequence (a guide sequence) that is complementary to a sequence (the target site) of a target nucleic acid (as described elsewhere herein). The endonuclease of the complex provides the site-specific activity. In other words, the endonuclease is guided to a target site (e.g., stabilized at a target site) within a target nucleic acid sequence (e.g. genomic DNA) by virtue of its association with the protein-binding segment of the guide RNA.

[0121] Examples and guidance related to type V and type VI CRISPR/Cas proteins (e.g., cpf1, C2c1, C2c2, and C2c3 guide RNAs) can be found in the art, for example, see Zetsche et al, Cell. 2015 Oct. 22; 163(3):759-71; Makarova et al, Nat Rev Microbiol. 2015 November; 13(11):722-36; and Shmakov et al., Mol Cell. 2015 Nov. 5; 60(3):385-97.

[0122] In some cases, the Type V or type VI CRISPR/Cas endonuclease (e.g., Cpf1, C2c1, C2c2, C2c3) is enzymatically active, e.g., the Type V or type VI CRISPR/Cas polypeptide, when bound to a guide RNA, cleaves a target nucleic acid. In some cases, the Type V or type VI CRISPR/Cas endonuclease (e.g., Cpf1, C2c1, C2c2, C2c3) exhibits reduced enzymatic activity relative to a corresponding wild-type a Type V or type VI CRISPR/Cas endonuclease (e.g., Cpf1, C2c1, C2c2, C2c3), and retains DNA binding activity (e.g., in some cases the endonuclease is a nickase).

[0123] In some cases a type V CRISPR/Cas endonuclease is a Cpf1 protein. In some cases, a Cpf1 protein comprises an amino acid sequence having at least 30%, at least 35%, at least 40%, at least 45%, at least 50%, at least 55%, at least 60%, at least 65%, at least 70%, at least 75%, at least 80%, at least 85%, at least 90%, at least 95%, at least 90%, or 100%, amino acid sequence identity to the Cpf1 amino acid sequence set forth in any of SEQ ID NOs: 1088-1092. In some cases, a Cpf1 protein comprises an amino acid sequence having at least 30%, at least 35%, at least 40%, at least 45%, at least 50%, at least 55%, at least 60%, at least 65%, at least 70%, at least 75%, at least 80%, at least 85%, at least 90%, at least 95%, at least 90%, or 100%, amino acid sequence identity to a contiguous stretch of from 100 amino acids to 200 amino acids (aa), from 200 aa to 400 aa, from 400 aa to 600 aa, from 600 aa to 800 aa, from 800 aa to 1000 aa, from 1000 aa to 1100 aa, from 1100 aa to 1200 aa, or from 1200 aa to 1300 aa, of the Cpf1 amino acid sequence set forth in any of SEQ ID NOs: 1088-1092.

[0124] In some cases, a Cpf1 protein comprises an amino acid sequence having at least 30%, at least 35%, at least 40%, at least 45%, at least 50%, at least 55%, at least 60%, at least 65%, at least 70%, at least 75%, at least 80%, at least 85%, at least 90%, at least 95%, at least 90%, or 100%, amino acid sequence identity to the RuvCI domain of the Cpf1 amino acid sequence set forth in any of SEQ ID NOs: 1088-1092. In some cases, a Cpf1 protein comprises an amino acid sequence having at least 30%, at least 35%, at least 40%, at least 45%, at least 50%, at least 55%, at least 60%, at least 65%, at least 70%, at least 75%, at least 80%, at least 85%, at least 90%, at least 95%, at least 90%, or 100%, amino acid sequence identity to the RuvCII domain of the Cpf1 amino acid sequence set forth in any of SEQ ID NOs: 1088-1092. In some cases, a Cpf1 protein comprises an amino acid sequence having at least 30%, at least 35%, at least 40%, at least 45%, at least 50%, at least 55%, at least 60%, at least 65%, at least 70%, at least 75%, at least 80%, at least 85%, at least 90%, at least 95%, at least 90%, or 100%, amino acid sequence identity to the RuvCIII domain of the Cpf1 amino acid sequence set forth in any of SEQ ID NOs: 1088-1092. In some cases, a Cpf1 protein comprises an amino acid sequence having at least 30%, at least 35%, at least 40%, at least 45%, at least 50%, at least 55%, at least 60%, at least 65%, at least 70%, at least 75%, at least 80%, at least 85%, at least 90%, at least 95%, at least 90%, or 100%, amino acid sequence identity to the RuvCI, RuvCII, and RuvCIII domains of the Cpf1 amino acid sequence set forth in any of SEQ ID NOs: 1088-1092.

[0125] In some cases, the Cpf1 protein exhibits reduced enzymatic activity relative to a wild-type Cpf1 protein (e.g., relative to a Cpf1 protein comprising the amino acid sequence set forth in any of SEQ ID NOs: 1088-1092), and retains DNA binding activity. In some cases, a Cpf1 protein comprises an amino acid sequence having at least 30%, at least 35%, at least 40%, at least 45%, at least 50%, at least 55%, at least 60%, at least 65%, at least 70%, at least 75%, at least 80%, at least 85%, at least 90%, at least 95%, at least 90%, or 100%, amino acid sequence identity to the Cpf1 amino acid sequence set forth in any of SEQ ID NOs: 1088-1092; and comprises an amino acid substitution (e.g., a D->A substitution) at an amino acid residue corresponding to amino acid 917 of the Cpf1 amino acid sequence set forth in SEQ ID NO: 1088. In some cases, a Cpf1 protein comprises an amino acid sequence having at least 30%, at least 35%, at least 40%, at least 45%, at least 50%, at least 55%, at least 60%, at least 65%, at least 70%, at least 75%, at least 80%, at least 85%, at least 90%, at least 95%, at least 90%, or 100%, amino acid sequence identity to the Cpf1 amino acid sequence set forth in any of SEQ ID NOs: 1088-1092; and comprises an amino acid substitution (e.g., an E->A substitution) at an amino acid residue corresponding to amino acid 1006 of the Cpf1 amino acid sequence set forth in SEQ ID NO: 1088. In some cases, a Cpf1 protein comprises an amino acid sequence having at least 30%, at least 35%, at least 40%, at least 45%, at least 50%, at least 55%, at least 60%, at least 65%, at least 70%, at least 75%, at least 80%, at least 85%, at least 90%, at least 95%, at least 90%, or 100%, amino acid sequence identity to the Cpf1 amino acid sequence set forth in any of SEQ ID NOs: 1088-1092; and comprises an amino acid substitution (e.g., a D->A substitution) at an amino acid residue corresponding to amino acid 1255 of the Cpf1 amino acid sequence set forth in SEQ ID NO: 1088.

[0126] In some cases, a suitable Cpf1 protein comprises an amino acid sequence having at least 30%, at least 35%, at least 40%, at least 45%, at least 50%, at least 55%, at least 60%, at least 65%, at least 70%, at least 75%, at least 80%, at least 85%, at least 90%, at least 95%, at least 90%, or 100%, amino acid sequence identity to the Cpf1 amino acid sequence set forth in any of SEQ ID NOs: 1088-1092.

[0127] In some cases a type V CRISPR/Cas endonuclease is a C2c1 protein (examples include those set forth as SEQ ID NOs: 1112-1119). In some cases, a C2c1 protein comprises an amino acid sequence having at least 30%, at least 35%, at least 40%, at least 45%, at least 50%, at least 55%, at least 60%, at least 65%, at least 70%, at least 75%, at least 80%, at least 85%, at least 90%, at least 95%, at least 90%, or 100%, amino acid sequence identity to the C2c1 amino acid sequence set forth in any of SEQ ID NOs: 1112-1119. In some cases, a C2c1 protein comprises an amino acid sequence having at least 30%, at least 35%, at least 40%, at least 45%, at least 50%, at least 55%, at least 60%, at least 65%, at least 70%, at least 75%, at least 80%, at least 85%, at least 90%, at least 95%, at least 90%, or 100%, amino acid sequence identity to a contiguous stretch of from 100 amino acids to 200 amino acids (aa), from 200 aa to 400 aa, from 400 aa to 600 aa, from 600 aa to 800 aa, from 800 aa to 1000 aa, from 1000 aa to 1100 aa, from 1100 aa to 1200 aa, or from 1200 aa to 1300 aa, of the C2c1 amino acid sequence set forth in any of SEQ ID NOs: 1112-1119.

[0128] In some cases, a C2c1 protein comprises an amino acid sequence having at least 30%, at least 35%, at least 40%, at least 45%, at least 50%, at least 55%, at least 60%, at least 65%, at least 70%, at least 75%, at least 80%, at least 85%, at least 90%, at least 95%, at least 90%, or 100%, amino acid sequence identity to the RuvCI domain of the C2c1 amino acid sequences set forth in any of SEQ ID NOs: 1112-1119). In some cases, a C2c1 protein comprises an amino acid sequence having at least 30%, at least 35%, at least 40%, at least 45%, at least 50%, at least 55%, at least 60%, at least 65%, at least 70%, at least 75%, at least 80%, at least 85%, at least 90%, at least 95%, at least 90%, or 100%, amino acid sequence identity to the RuvCII domain of the C2c1 amino acid sequence set forth in any of SEQ ID NOs: 1112-1119. In some cases, a C2c1 protein comprises an amino acid sequence having at least 30%, at least 35%, at least 40%, at least 45%, at least 50%, at least 55%, at least 60%, at least 65%, at least 70%, at least 75%, at least 80%, at least 85%, at least 90%, at least 95%, at least 90%, or 100%, amino acid sequence identity to the RuvCIII domain of the C2c1 amino acid sequence set forth in any of SEQ ID NOs: 1112-1119. In some cases, a C2c1 protein comprises an amino acid sequence having at least 30%, at least 35%, at least 40%, at least 45%, at least 50%, at least 55%, at least 60%, at least 65%, at least 70%, at least 75%, at least 80%, at least 85%, at least 90%, at least 95%, at least 90%, or 100%, amino acid sequence identity to the RuvCI, RuvCII, and RuvCIII domains of the C2c1 amino acid sequence set forth in any of SEQ ID NOs: 1112-1119.

[0129] In some cases, the C2c1 protein exhibits reduced enzymatic activity relative to a wild-type C2c1 protein (e.g., relative to a C2c1 protein comprising the amino acid sequence set forth in any of SEQ ID NOs: 1112-1119), and retains DNA binding activity. In some cases, a suitable C2c1 protein comprises an amino acid sequence having at least 30%, at least 35%, at least 40%, at least 45%, at least 50%, at least 55%, at least 60%, at least 65%, at least 70%, at least 75%, at least 80%, at least 85%, at least 90%, at least 95%, at least 90%, or 100%, amino acid sequence identity to the C2c1 amino acid sequence set forth in any of SEQ ID NOs: 1112-1119.

[0130] In some cases a type V CRISPR/Cas endonuclease is a C2c3 protein (examples include those set forth as SEQ ID NOs: 1120-1123). In some cases, a C2c3 protein comprises an amino acid sequence having at least 30%, at least 35%, at least 40%, at least 45%, at least 50%, at least 55%, at least 60%, at least 65%, at least 70%, at least 75%, at least 80%, at least 85%, at least 90%, at least 95%, at least 90%, or 100%, amino acid sequence identity to the C2c3 amino acid sequence set forth in any of SEQ ID NOs: 1120-1123. In some cases, a C2c3 protein comprises an amino acid sequence having at least 30%, at least 35%, at least 40%, at least 45%, at least 50%, at least 55%, at least 60%, at least 65%, at least 70%, at least 75%, at least 80%, at least 85%, at least 90%, at least 95%, at least 90%, or 100%, amino acid sequence identity to a contiguous stretch of from 100 amino acids to 200 amino acids (aa), from 200 aa to 400 aa, from 400 aa to 600 aa, from 600 aa to 800 aa, from 800 aa to 1000 aa, from 1000 aa to 1100 aa, from 1100 aa to 1200 aa, or from 1200 aa to 1300 aa, of the C2c3 amino acid sequence set forth in any of SEQ ID NOs: 1120-1123.

[0131] In some cases, a C2c3 protein comprises an amino acid sequence having at least 30%, at least 35%, at least 40%, at least 45%, at least 50%, at least 55%, at least 60%, at least 65%, at least 70%, at least 75%, at least 80%, at least 85%, at least 90%, at least 95%, at least 90%, or 100%, amino acid sequence identity to the RuvCI domain of the C2c3 amino acid sequence set forth in any of SEQ ID NOs: 1120-1123. In some cases, a C2c3 protein comprises an amino acid sequence having at least 30%, at least 35%, at least 40%, at least 45%, at least 50%, at least 55%, at least 60%, at least 65%, at least 70%, at least 75%, at least 80%, at least 85%, at least 90%, at least 95%, at least 90%, or 100%, amino acid sequence identity to the RuvCII domain of the C2c3 amino acid sequence set forth in any of SEQ ID NOs: 1120-1123. In some cases, a C2c3 protein comprises an amino acid sequence having at least 30%, at least 35%, at least 40%, at least 45%, at least 50%, at least 55%, at least 60%, at least 65%, at least 70%, at least 75%, at least 80%, at least 85%, at least 90%, at least 95%, at least 90%, or 100%, amino acid sequence identity to the RuvCIII domain of the C2c3 amino acid sequence set forth in any of SEQ ID NOs: 1120-1123. In some cases, a C2c3 protein comprises an amino acid sequence having at least 30%, at least 35%, at least 40%, at least 45%, at least 50%, at least 55%, at least 60%, at least 65%, at least 70%, at least 75%, at least 80%, at least 85%, at least 90%, at least 95%, at least 90%, or 100%, amino acid sequence identity to the RuvCI, RuvCII, and RuvCIII domains of the C2c3 amino acid sequence set forth in any of SEQ ID NOs: 1120-1123.

[0132] In some cases, the C2c3 protein exhibits reduced enzymatic activity relative to a wild-type C2c3 protein (e.g., relative to a C2c3 protein comprising the amino acid sequence set forth in any of SEQ ID NOs: 1120-1123), and retains DNA binding activity. In some cases, a suitable C2c3 protein comprises an amino acid sequence having at least 30%, at least 35%, at least 40%, at least 45%, at least 50%, at least 55%, at least 60%, at least 65%, at least 70%, at least 75%, at least 80%, at least 85%, at least 90%, at least 95%, at least 90%, or 100%, amino acid sequence identity to the C2c3 amino acid sequence set forth in any of SEQ ID NOs: 1120-1123.

[0133] In some cases a type VI CRISPR/Cas endonuclease is a C2c2 protein (examples include those set forth as SEQ ID NOs: 1124-1135). In some cases, a C2c2 protein comprises an amino acid sequence having at least 30%, at least 35%, at least 40%, at least 45%, at least 50%, at least 55%, at least 60%, at least 65%, at least 70%, at least 75%, at least 80%, at least 85%, at least 90%, at least 95%, at least 90%, or 100%, amino acid sequence identity to the C2c2 amino acid sequence set forth in any of SEQ ID NOs: 1124-1135. In some cases, a C2c2 protein comprises an amino acid sequence having at least 30%, at least 35%, at least 40%, at least 45%, at least 50%, at least 55%, at least 60%, at least 65%, at least 70%, at least 75%, at least 80%, at least 85%, at least 90%, at least 95%, at least 90%, or 100%, amino acid sequence identity to a contiguous stretch of from 100 amino acids to 200 amino acids (aa), from 200 aa to 400 aa, from 400 aa to 600 aa, from 600 aa to 800 aa, from 800 aa to 1000 aa, from 1000 aa to 1100 aa, from 1100 aa to 1200 aa, or from 1200 aa to 1300 aa, of the C2c2 amino acid sequence set forth in any of SEQ ID NOs: 1124-1135.

[0134] In some cases, a C2c2 protein comprises an amino acid sequence having at least 30%, at least 35%, at least 40%, at least 45%, at least 50%, at least 55%, at least 60%, at least 65%, at least 70%, at least 75%, at least 80%, at least 85%, at least 90%, at least 95%, at least 90%, or 100%, amino acid sequence identity to the RuvCI domain of the C2c2 amino acid sequence set forth in any of SEQ ID NOs: 1124-1135. In some cases, a C2c2 protein comprises an amino acid sequence having at least 30%, at least 35%, at least 40%, at least 45%, at least 50%, at least 55%, at least 60%, at least 65%, at least 70%, at least 75%, at least 80%, at least 85%, at least 90%, at least 95%, at least 90%, or 100%, amino acid sequence identity to the RuvCII domain of the C2c2 amino acid sequence set forth in any of SEQ ID NOs: 1124-1135. In some cases, a C2c2 protein comprises an amino acid sequence having at least 30%, at least 35%, at least 40%, at least 45%, at least 50%, at least 55%, at least 60%, at least 65%, at least 70%, at least 75%, at least 80%, at least 85%, at least 90%, at least 95%, at least 90%, or 100%, amino acid sequence identity to the RuvCIII domain of the C2c2 amino acid sequence set forth in any of SEQ ID NOs: 1124-1135. In some cases, a C2c2 protein comprises an amino acid sequence having at least 30%, at least 35%, at least 40%, at least 45%, at least 50%, at least 55%, at least 60%, at least 65%, at least 70%, at least 75%, at least 80%, at least 85%, at least 90%, at least 95%, at least 90%, or 100%, amino acid sequence identity to the RuvCI, RuvCII, and RuvCIII domains of the C2c2 amino acid sequence set forth in any of SEQ ID NOs: 1124-1135.

[0135] In some cases, the C2c2 protein exhibits reduced enzymatic activity relative to a wild-type C2c2 protein (e.g., relative to a C2c2 protein comprising the amino acid sequence set forth in any of SEQ ID NOs: 1124-1135), and retains DNA binding activity. In some cases, a suitable C2c2 protein comprises an amino acid sequence having at least 30%, at least 35%, at least 40%, at least 45%, at least 50%, at least 55%, at least 60%, at least 65%, at least 70%, at least 75%, at least 80%, at least 85%, at least 90%, at least 95%, at least 90%, or 100%, amino acid sequence identity to the C2c2 amino acid sequence set forth in any of SEQ ID NOs: 1124-1135.

### PAM Sequence

[0136] A wild type class 2 CRISPR/Cas endonuclease (e.g., Cas9 protein) normally has nuclease activity that cleaves a target nucleic acid (e.g., a double stranded DNA (dsDNA)) at a target site defined by complementarity between the guide sequence of the CRISPR/Cas guide RNA and the target nucleic acid. In some cases, site-specific cleavage of the target nucleic acid occurs at locations determined by both (i) base-pairing complementarity between the CRISPR/Cas guide RNA and the target nucleic acid; and (ii) a short motif referred to as the protospacer adjacent motif (PAM) in the target nucleic acid. For example, when the class 2 CRISPR/Cas endonuclease is a wild type Cas9 protein, the PAM sequence that is recognized (e.g., bound) by the Cas9 protein is present on the non-complementary strand (the strand that does not hybridize with the guide sequence of the Cas9 guide RNA) of the target DNA and is adjacent to the target site.

[0137] In some cases, (e.g., in some cases where the class 2 CRISPR/Cas endonuclease is an S. pyogenes Cas9 protein) the PAM sequence of the non-complementary strand is 5′-XGG-3′, where X is any DNA nucleotide and X is immediately 3′ of the target sequence of the non-complementary strand of the target DNA. As such, the sequence of the complementary strand that hybridizes with the PAM sequence is 5′-CCY-3′, where Y is any DNA nucleotide and Y is immediately 5′ of the target sequence of the complementary strand of the target DNA. In some such embodiments, X and Y can be complementary and the X-Y base pair can be any basepair (e.g., X=C and Y=G; X=G and Y=C; X=A and Y=T, X=T and Y=A).

[0138] In some cases, it may be advantageous to use different class 2 CRISPR/Cas endonucleases (e.g., Cas9 proteins from various species, type V or type VI CRISPR/Cas endonucleases, and the like) for the subject methods in order to capitalize on various characteristics (e.g., enzymatic characteristics) of the different endonucleases (e.g., for different PAM sequence preferences; for increased or decreased enzymatic activity; for an increased or decreased level of cellular toxicity; to change the balance between NHEJ, homology-directed repair, single strand breaks, double strand breaks, etc.).

[0139] Class 2 CRISPR/Cas endonucleases (e.g., Cas9 proteins) from various species can require different PAM sequences in the target DNA, and different types of Class 2 CRISPR/Cas endonucleases (e.g., type II proteins, e.g., Cas9 proteins; type V proteins; type VI proteins; and the like) can have different requirements (e.g., 5′, 3′, complementary strand, non-complementary strand, distance from target sequence, and the like) for the location of the PAM sequence relative to the targeted sequence of the target DNA. Thus, for a particular Class 2 CRISPR/Cas endonuclease of choice, the PAM sequence requirement may be different than the 5′-XGG-3′ sequence described above for the S. pyogenes Cas9 protein.

[0140] In some embodiments (e.g., when the Cas9 protein is derived from S. pyogenes or a closely related Cas9 is used; see for example, Chylinski et al., RNA Biol. 2013 May; 10(5):726-37; and Jinek et al., Science. 2012 Aug. 17; 337(6096):816-21; both of which are hereby incorporated by reference in their entirety), a PAM sequence can be can be 5′-NGG-3′, where N is any nucleotide. In some embodiments (e.g., when a Cas9 protein is derived from the Cas9 protein of Neisseria meningitidis or a closely related Cas9 is used), the PAM sequence can be 5′-NNNNGANN-3′, 5′-NNNNGTTN-3′, 5′-NNNNGNNT-3′, 5′-NNNNGTNN-3′, 5′-NNNNGNTN-3′, or 5′-NNNNGATT-3′, where N is any nucleotide. In some embodiments (e.g., when a Cas9 protein is derived from Streptococcus thermophilus #1 or a closely related Cas9 is used), the PAM sequence can be 5′-NNAGAA-3′, 5′-NNAGGA-3′, 5′-NNGGAA-3′, 5′-NNANAA-3′, or 5′-NNGGGA-3′ where N is any nucleotide. In some embodiments (e.g., when a Cas9 protein is derived from Treponema denticola (TD) or a closely related Cas9 is used), the PAM sequence can be 5′-NAAAAN-3′, 5′-NAAAAC-3′, 5′-NAAANC-3′, 5′-NANAAC-3′, or 5′-NNAAAC-3′, where N is any nucleotide.

[0141] The PAM requirements for any given Class 2 CRISPR/Cas endonuclease can be determined using standard, routine, conventional methods, which can include experimental methods and/or in silico analysis of naturally existing sequences from species of interest. For example, as would be known by one of ordinary skill in the art, additional PAM sequences for other Class 2 CRISPR/Cas endonucleases (e.g., Cas9 proteins of different species; type IV CRISPR/Cas endonucleases, type V CRISPR/Cas endonucleases, and the like) can readily be determined using bioinformatic analysis (e.g., analysis of genomic sequencing data). For example, see Mojica et al., Microbiology. 2009 March; 155(Pt 3):733-40; and Esvelt et al., Nat Methods. 2013 November; 10(11):1116-21, for additional information.

[0142] In addition, as known in the art, the PAM-interacting domain of a Class 2 CRISPR/Cas endonuclease (e.g., a Cas9 protein) can be derived from an endonuclease (e.g., Cas9 protein) from a first species, and the PAM sequence can correspond to that domain. Thus, in some cases, a Class 2 CRISPR/Cas endonuclease has a PAM-interacting domain that is derived from (e.g., that is from) a Class 2 CRISPR/Cas endonuclease (e.g., Cas9 protein) of a first species, and other portions of the Class 2 CRISPR/Cas endonuclease (e.g., Cas9 protein) can be derived from (e.g., can be from) a second species.

### Guide RNA (for CRISPR Cas Endonucleases)

[0143] A nucleic acid molecule that binds to a class 2 CRISPR/Cas endonuclease (e.g., a Cas9 protein; a type V or type VI CRISPR/Cas protein; a Cpf1 protein; etc.) and targets the complex to a specific location within a target nucleic acid is referred to herein as a “guide RNA” or “CRISPR/Cas guide nucleic acid” or “CRISPR/Cas guide RNA.”

[0144] A guide RNA provides target specificity to the complex (the RNP complex) by including a targeting segment, which includes a guide sequence (also referred to herein as a targeting sequence), which is a nucleotide sequence that is complementary to a sequence of a target nucleic acid.

[0145] A guide RNA can be referred to by the protein to which it corresponds. For example, when the class 2 CRISPR/Cas endonuclease is a Cas9 protein, the corresponding guide RNA can be referred to as a “Cas9 guide RNA.” Likewise, as another example, when the class 2 CRISPR/Cas endonuclease is a Cpf1 protein, the corresponding guide RNA can be referred to as a “Cpf1 guide RNA.”

[0146] In some embodiments, a guide RNA includes two separate nucleic acid molecules: an “activator” and a “targeter” and is referred to herein as a “dual guide RNA”, a “double-molecule guide RNA”, a “two-molecule guide RNA”, or a “dgRNA.” In some embodiments, the guide RNA is one molecule (e.g., for some class 2 CRISPR/Cas proteins, the corresponding guide RNA is a single molecule; and in some cases, an activator and targeter are covalently linked to one another, e.g., via intervening nucleotides), and the guide RNA is referred to as a “single guide RNA”, a “single-molecule guide RNA,” a “one-molecule guide RNA”, or simply “sgRNA.”

[0147] In some embodiments a subject CRISPR/Cas guide RNA (e.g., a Cas9 guide RNA) targets a target sequence depicted in Table 2 (provided in FIG. 23) (e.g., also see Table 3 of the examples below). In some embodiments a subject CRISPR/Cas guide RNA (e.g., a Cas9 guide RNA) targets a target sequence depicted in Table 9 (provided in FIG. 24).

[0148] Table 2 (FIG. 23). Examples of (i) target sequences (non-complementary strand) of target DNA, and (ii) guide sequences of CRISPR/Cas guide RNAs (e.g., for CRISPR/Cas proteins such as S. pyogenes Cas9 that have a PAM requirement of NGG in the non-complementary strand), where the first targeted sequence is within intron 44 of the human dystrophin gene and the second targeted sequence is within intron 55 of the human dystrophin gene. A guide sequence that is targeted to a target sequence within intron 44 of the human dystrophin gene is referred to as a “44” series guide sequence; and a guide sequence that is targeted to a target sequence within intron 55 of the human dystrophin gene is referred to as a “55” series guide sequence.

[0149] For example, in some cases, the non-complementary strand of target sequence that is targeted by a first CRISPR/Cas guide RNA (e.g., a Cas9 guide RNA) includes a sequence selected from SEQ ID NOs: 1140-1144 (which sequences are 20 nucleotides long and are within intron 44 of the human dystrophin gene). In some cases, the non-complementary strand of target sequence that is targeted by a first CRISPR/Cas guide RNA (e.g., a Cas9 guide RNA) includes a sequence selected from SEQ ID NOs: 1145-1149 (which sequences are 17 nucleotides long and are within intron 44 of the human dystrophin gene). In some cases, a first CRISPR/Cas guide RNA (e.g., a Cas9 guide RNA) includes a guide sequence that includes a sequence selected from SEQ ID NOs: 1150-1154 (which sequences are 20 nucleotides long and hybridize to a target sequence within intron 44 of the human dystrophin gene). In some cases, a first CRISPR/Cas guide RNA (e.g., a Cas9 guide RNA) includes a guide sequence that includes a sequence selected from SEQ ID NOs: 1155-1159 (which sequences are 17 nucleotides long and hybridize to a target sequence within intron 44 of the human dystrophin gene). In some cases, the non-complementary strand of target sequence that is targeted by a first CRISPR/Cas guide RNA (e.g., a Cas9 guide RNA) includes a sequence selected from SEQ ID NOs: 1136-1139 and SEQ ID NOs: 1180-1222 (which sequences are within intron 44 of the human dystrophin gene). In some cases, a first CRISPR/Cas guide RNA (e.g., a Cas9 guide RNA) includes a guide sequence that includes a sequence selected from SEQ ID NOs: 1223-1269 (which sequences hybridize to a target sequence within intron 44 of the human dystrophin gene).

[0150] In some embodiments, the non-complementary strand of target sequence that is targeted by a second CRISPR/Cas guide RNA (e.g., a Cas9 guide RNA) includes a sequence selected from SEQ ID NOs: 1160-1164 (which sequences are 20 nucleotides long and are within intron 55 of the human dystrophin gene). In some cases, the non-complementary strand of target sequence that is targeted by a second CRISPR/Cas guide RNA (e.g., a Cas9 guide RNA) includes a sequence selected from SEQ ID NOs: 1165-1169 (which sequences are 17 nucleotides long and are within intron 55 of the human dystrophin gene). In some cases, a second CRISPR/Cas guide RNA (e.g., a Cas9 guide RNA) includes a guide sequence that includes a sequence selected from SEQ ID NOs: 1170-1174 (which sequences are 20 nucleotides long and hybridize to a target sequence within intron 55 of the human dystrophin gene). In some cases, a second CRISPR/Cas guide RNA (e.g., a Cas9 guide RNA) includes a guide sequence that includes a sequence selected from SEQ ID NOs: 1175-1179 (which sequences are 17 nucleotides long and hybridize to a target sequence within intron 55 of the human dystrophin gene).). In some cases, the non-complementary strand of target sequence that is targeted by a second CRISPR/Cas guide RNA (e.g., a Cas9 guide RNA) includes a sequence selected from SEQ ID NOs: 1270-1317 (which sequences are within intron 55 of the human dystrophin gene). In some cases, a second CRISPR/Cas guide RNA (e.g., a Cas9 guide RNA) includes a guide sequence that includes a sequence selected from SEQ ID NOs: 1318-1365 (which sequences hybridize to a target sequence within intron 55 of the human dystrophin gene).

[0151] In some cases, the non-complementary strand of target sequence that is targeted by a first CRISPR/Cas guide RNA (e.g., a Cas9 guide RNA) includes a sequence selected from SEQ ID NOs: 1140-1144 (which sequences are 20 nucleotides long and are within intron 44 of the human dystrophin gene), and the non-complementary strand of target sequence that is targeted by a second CRISPR/Cas guide RNA (e.g., a Cas9 guide RNA) includes a sequence selected from SEQ ID NOs: 1160-1164 (which sequences are 20 nucleotides long and are within intron 55 of the human dystrophin gene).

[0152] In some cases, the non-complementary strand of target sequence that is targeted by a first CRISPR/Cas guide RNA (e.g., a Cas9 guide RNA) includes a sequence selected from SEQ ID NOs: 1136-1139 and SEQ ID NOs: 1180-1222 (which sequences are within intron 44 of the human dystrophin gene), and the non-complementary strand of target sequence that is targeted by a second CRISPR/Cas guide RNA (e.g., a Cas9 guide RNA) includes a sequence selected from SEQ ID NOs: 1270-1317 (which sequences are 20 nucleotides long and are within intron 55 of the human dystrophin gene).

[0153] In some cases, the non-complementary strand of target sequence that is targeted by a first CRISPR/Cas guide RNA (e.g., a Cas9 guide RNA) includes a sequence selected from SEQ ID NOs: 1145-1149 (which sequences are 17 nucleotides long and are within intron 44 of the human dystrophin gene), and the non-complementary strand of target sequence that is targeted by a second CRISPR/Cas guide RNA (e.g., a Cas9 guide RNA) includes a sequence selected from SEQ ID NOs: 1165-1169 (which sequences are 17 nucleotides long and are within intron 55 of the human dystrophin gene).

[0154] In some cases, a first CRISPR/Cas guide RNA (e.g., a Cas9 guide RNA) includes a guide sequence that includes a sequence selected from SEQ ID NOs: 1150-1154 (which sequences are 20 nucleotides long and hybridize to a target sequence within intron 44 of the human dystrophin gene), and a second CRISPR/Cas guide RNA (e.g., a Cas9 guide RNA) includes a guide sequence that includes a sequence selected from SEQ ID NOs: 1170-1174 (which sequences are 20 nucleotides long and hybridize to a target sequence within intron 55 of the human dystrophin gene).

[0155] In some cases, a first CRISPR/Cas guide RNA (e.g., a Cas9 guide RNA) includes a guide sequence that includes a sequence selected from SEQ ID NOs: 1150-1154 (which sequences are 20 nucleotides long and hybridize to a target sequence within intron 44 of the human dystrophin gene), and a second CRISPR/Cas guide RNA (e.g., a Cas9 guide RNA) includes a guide sequence that includes a sequence selected from SEQ ID NOs: 1170-1174 (which sequences are 20 nucleotides long and hybridize to a target sequence within intron 55 of the human dystrophin gene).

[0156] In some cases, a first CRISPR/Cas guide RNA (e.g., a Cas9 guide RNA) includes a guide sequence that includes a sequence selected from SEQ ID NOs: 1223-1269 (which sequences hybridize to a target sequence within intron 44 of the human dystrophin gene), and a second CRISPR/Cas guide RNA (e.g., a Cas9 guide RNA) includes a guide sequence that includes a sequence selected from SEQ ID NOs: 1318-1365 (which sequences hybridize to a target sequence within intron 55 of the human dystrophin gene). In some cases, the duplex-forming portion of a guide RNA suitable for use herein comprises the sequence:

(SEQ ID NO: 1366)

gttttagagctaGAAAtagcaagttaaaataaggctagtccgttatcaac
ttgaaaaagtggcaccgagtcggtgcTTTTTT,
or

(SEQ ID NO: 1367)

guuuuagagcuaGAAAuagcaaguuaaaauaaggcuaguccguuaucaac
uugaaaaaguggcaccgagucggugcUUUUUU.

[0157] In some cases, a first CRISPR/Cas guide RNA (e.g., a Cas9 guide RNA) includes a guide sequence comprising the nucleotide sequence set forth in SEQ ID NO:1223; and a second second CRISPR/Cas guide RNA (e.g., a Cas9 guide RNA) includes a guide sequence comprising the nucleotide sequence set forth in SEQ ID NO: 1320. In some cases, the duplex-forming portion of a guide RNA suitable for use herein comprises the sequence:

(SEQ ID NO: 1366)

gttttagagctaGAAAtagcaagttaaaataaggctagtccgttatcaac
ttgaaaaagtggcaccgagtcggtgcTTTTTT,
or

(SEQ ID NO: 1367)

guuuuagagcuaGAAAuagcaaguuaaaauaaggcuaguccguuaucaac
uugaaaaaguggcaccgagucggugcUUUUUU.

[0158] In some cases, a first CRISPR/Cas guide RNA (e.g., a Cas9 guide RNA) includes a guide sequence comprising the nucleotide sequence set forth in SEQ ID NO:1224; and a second second CRISPR/Cas guide RNA (e.g., a Cas9 guide RNA) includes a guide sequence comprising the nucleotide sequence set forth in SEQ ID NO: 1320. In some cases, the duplex-forming portion of a guide RNA suitable for use herein comprises the sequence:

(SEQ ID NO: 1366)
gttttagagctaGAAAtagcaagttaaaataaggctagtccgttatcaa
cttgaaaaagtggcaccgagtcggtgcTTTTTT,
or
(SEQ ID NO: 1367)
guuuuagagcuaGAAAuagcaaguuaaaauaaggcuaguccguuaucaa
cuugaaaaaguggcaccgagucggugcUUUUUU.

[0159] In some cases, a first CRISPR/Cas guide RNA (e.g., a Cas9 guide RNA) includes a guide sequence comprising the nucleotide sequence set forth in SEQ ID NO:1225; and a second second CRISPR/Cas guide RNA (e.g., a Cas9 guide RNA) includes a guide sequence comprising the nucleotide sequence set forth in SEQ ID NO: 1320. In some cases, the duplex-forming portion of a guide RNA suitable for use herein comprises the sequence:

(SEQ ID NO: 1366)
gttttagagctaGAAAtagcaagttaaaataaggctagtccgttatcaa
cttgaaaaagtggcaccgagtcggtgcTTTTTT,
or
(SEQ ID NO: 1367)
guuuuagagcuaGAAAuagcaaguuaaaauaaggcuaguccguuaucaa
cuugaaaaaguggcaccgagucggugcUUUUUU.

[0160] In some cases, a first CRISPR/Cas guide RNA (e.g., a Cas9 guide RNA) includes a guide sequence comprising the nucleotide sequence set forth in SEQ ID NO:1153; and a second second CRISPR/Cas guide RNA (e.g., a Cas9 guide RNA) includes a guide sequence comprising the nucleotide sequence set forth in SEQ ID NO: 1172. In some cases, the duplex-forming portion of a guide RNA suitable for use herein comprises the sequence:

(SEQ ID NO: 1366)
gttttagagctaGAAAtagcaagttaaaataaggctagtccgttatcaa
cttgaaaaagtggcaccgagtcggtgcTTTTTT,
or
(SEQ ID NO: 1367)
guuuuagagcuaGAAAuagcaaguuaaaauaaggcuaguccguuaucaa
cuugaaaaaguggcaccgagucggugcUUUUUU.

[0161] In some cases, a first CRISPR/Cas guide RNA (e.g., a Cas9 guide RNA) includes a guide sequence comprising the nucleotide sequence set forth in SEQ ID NO:1153; and a second second CRISPR/Cas guide RNA (e.g., a Cas9 guide RNA) includes a guide sequence comprising the nucleotide sequence set forth in SEQ ID NO:1171. In some cases, the duplex-forming portion of a guide RNA suitable for use herein comprises the sequence:

(SEQ ID NO: 1366)
gttttagagctaGAAAtagcaagttaaaataaggctagtccgttatcaa
cttgaaaaagtggcaccgagtcggtgcTTTTTT,
or
(SEQ ID NO: 1367)
guuuuagagcuaGAAAuagcaaguuaaaauaaggcuaguccguuaucaa
cuugaaaaaguggcaccgagucggugcUUUUUU.

[0162] In some cases, a first CRISPR/Cas guide RNA (e.g., a Cas9 guide RNA) includes a guide sequence comprising the nucleotide sequence set forth in SEQ ID NO:1152; and a second second CRISPR/Cas guide RNA (e.g., a Cas9 guide RNA) includes a guide sequence comprising the nucleotide sequence set forth in SEQ ID NO: 1172. In some cases, the duplex-forming portion of a guide RNA suitable for use herein comprises the sequence:

(SEQ ID NO: 1366)
gttttagagctaGAAAtagcaagttaaaataaggctagtccgttatcaa
cttgaaaaagtggcaccgagtcggtgcTTTTTT,
or
(SEQ ID NO: 1367)
guuuuagagcuaGAAAuagcaaguuaaaauaaggcuaguccguuaucaa
cuugaaaaaguggcaccgagucggugcUUUUUU.

[0163] In some cases, a first CRISPR/Cas guide RNA (e.g., a Cas9 guide RNA) includes a guide sequence comprising the nucleotide sequence set forth in SEQ ID NO:1152; and a second second CRISPR/Cas guide RNA (e.g., a Cas9 guide RNA) includes a guide sequence comprising the nucleotide sequence set forth in SEQ ID NO:1171. In some cases, the duplex-forming portion of a guide RNA suitable for use herein comprises the sequence:

(SEQ ID NO: 1366)
gttttagagctaGAAAtagcaagttaaaataaggctagtccgttatcaa
cttgaaaaagtggcaccgagtcggtgcTTTTTT,
or
(SEQ ID NO: 1367)
guuuuagagcuaGAAAuagcaaguuaaaauaaggcuaguccguuaucaa
cuugaaaaaguggcaccgagucggugcUUUUUU.

[0164] In some cases, a first CRISPR/Cas guide RNA (e.g., a Cas9 guide RNA) includes a guide sequence comprising the nucleotide sequence set forth in SEQ ID NO:1150; and a second second CRISPR/Cas guide RNA (e.g., a Cas9 guide RNA) includes a guide sequence comprising the nucleotide sequence set forth in SEQ ID NO: 1172. In some cases, the duplex-forming portion of a guide RNA suitable for use herein comprises the sequence:

(SEQ ID NO: 1366)
gttttagagctaGAAAtagcaagttaaaataaggctagtccgttatcaa
cttgaaaaagtggcaccgagtcggtgcTTTTTT,
or
(SEQ ID NO: 1367)
guuuuagagcuaGAAAuagcaaguuaaaauaaggcuaguccguuaucaa
cuugaaaaaguggcaccgagucggugcUUUUUU.

[0165] In some cases, a first CRISPR/Cas guide RNA (e.g., a Cas9 guide RNA) includes a guide sequence comprising the nucleotide sequence set forth in SEQ ID NO:1150; and a second second CRISPR/Cas guide RNA (e.g., a Cas9 guide RNA) includes a guide sequence comprising the nucleotide sequence set forth in SEQ ID NO:1171. In some cases, the duplex-forming portion of a guide RNA suitable for use herein comprises the sequence:

(SEQ ID NO: 1366)
gttttagagctaGAAAtagcaagttaaaataaggctagtccgttatcaa
cttgaaaaagtggcaccgagtcggtgcTTTTTT,
or
(SEQ ID NO: 1367)
guuuuagagcuaGAAAuagcaaguuaaaauaaggcuaguccguuaucaa
cuugaaaaaguggcaccgagucggugcUUUUUU.

[0166] In some cases, a first CRISPR/Cas guide RNA (e.g., a Cas9 guide RNA) includes a guide sequence comprising the nucleotide sequence set forth in SEQ ID NO:1150; and a second second CRISPR/Cas guide RNA (e.g., a Cas9 guide RNA) includes a guide sequence comprising the nucleotide sequence set forth in SEQ ID NO: 1174. In some cases, the duplex-forming portion of a guide RNA suitable for use herein comprises the sequence:

(SEQ ID NO: 1366)
gttttagagctaGAAAtagcaagttaaaataaggctagtccgttatcaa
cttgaaaaagtggcaccgagtcggtgcTTTTTT,
or
(SEQ ID NO: 1367)
guuuuagagcuaGAAAuagcaaguuaaaauaaggcuaguccguuaucaa
cuugaaaaaguggcaccgagucggugcUUUUUU.

[0167] In some cases, a first CRISPR/Cas guide RNA (e.g., a Cas9 guide RNA) includes a guide sequence comprising the nucleotide sequence set forth in SEQ ID NO:1152; and a second second CRISPR/Cas guide RNA (e.g., a Cas9 guide RNA) includes a guide sequence comprising the nucleotide sequence set forth in SEQ ID NO: 1174. In some cases, the duplex-forming portion of a guide RNA suitable for use herein comprises the sequence:

(SEQ ID NO: 1366)
gttttagagctaGAAAtagcaagttaaaataaggctagtccgttatcaa
cttgaaaaagtggcaccgagtcggtgcTTTTTT,
or
(SEQ ID NO: 1367)
guuuuagagcuaGAAAuagcaaguuaaaauaaggcuaguccguuaucaa
cuugaaaaaguggcaccgagucggugcUUUUUU.

[0168] In some cases, a first CRISPR/Cas guide RNA (e.g., a Cas9 guide RNA) includes a guide sequence that includes a sequence selected from SEQ ID NOs: 1155-1159 (which sequences are 17 nucleotides long and hybridize to a target sequence within intron 44 of the human dystrophin gene), and a second CRISPR/Cas guide RNA (e.g., a Cas9 guide RNA) includes a guide sequence that includes a sequence selected from SEQ ID NOs: 1175-1179 (which sequences are 17 nucleotides long and hybridize to a target sequence within intron 55 of the human dystrophin gene).

[0169] In some cases, the non-complementary strand of target sequence that is targeted by a first CRISPR/Cas guide RNA (e.g., a Cas9 guide RNA) includes the sequence set forth in SEQ ID NO: 1143 (within intron 44), and the non-complementary strand of target sequence that is targeted by a second CRISPR/Cas guide RNA (e.g., a Cas9 guide RNA) includes the sequence set forth in SEQ ID NO: 1162 (within intron 55). In some cases, the non-complementary strand of target sequence that is targeted by a first CRISPR/Cas guide RNA (e.g., a Cas9 guide RNA) includes the sequence set forth in SEQ ID NO: 1148 (within intron 44), and the non-complementary strand of target sequence that is targeted by a second CRISPR/Cas guide RNA (e.g., a Cas9 guide RNA) includes the sequence set forth in SEQ ID NO: 1167 (within intron 55).

[0170] In some cases, a first CRISPR/Cas guide RNA (e.g., a Cas9 guide RNA) includes a guide sequence that includes the sequence set forth in SEQ ID NO: 1153 (targets intron 44), and a second CRISPR/Cas guide RNA (e.g., a Cas9 guide RNA) includes a guide sequence that includes the sequence set forth in SEQ ID NO: 1172 (targets intron 55). In some cases, a first CRISPR/Cas guide RNA (e.g., a Cas9 guide RNA) includes a guide sequence that includes the sequence set forth in SEQ ID NO: 1158 (targets intron 44), and a second CRISPR/Cas guide RNA (e.g., a Cas9 guide RNA) includes a guide sequence that includes the sequence set forth in SEQ ID NO: 1177 (targets intron 55).

### Cas9 Guide RNA

[0171] A nucleic acid molecule that binds to a Cas9 protein and targets the complex to a specific location within a target nucleic acid is referred to herein as a “Cas9 guide RNA.”

[0172] A Cas9 guide RNA (can be said to include two segments, a first segment (referred to herein as a “targeting segment”); and a second segment (referred to herein as a “protein-binding segment”). By “segment” it is meant a segment/section/region of a molecule, e.g., a contiguous stretch of nucleotides in a nucleic acid molecule. A segment can also mean a region/section of a complex such that a segment may comprise regions of more than one molecule.

[0173] The first segment (targeting segment) of a Cas9 guide RNA includes a nucleotide sequence (a guide sequence) that is complementary to (and therefore hybridizes with) a specific sequence (a target site) within a target nucleic acid (e.g., a target genomic DNA). The protein-binding segment (or “protein-binding sequence”) interacts with (binds to) a Cas9 polypeptide. The protein-binding segment of a subject Cas9 guide RNA includes two complementary stretches of nucleotides that hybridize to one another to form a double stranded RNA duplex (dsRNA duplex). Site-specific binding and/or cleavage of a target nucleic acid (e.g., genomic DNA) can occur at locations (e.g., target sequence of a target locus, e.g., introns 44 and 55 of the human dystrophin gene) determined by base-pairing complementarity between the Cas9 guide RNA (the guide sequence of the Cas9 guide RNA) and the target nucleic acid.

[0174] A Cas9 guide RNA and a Cas9 protein form a complex (e.g., bind via non-covalent interactions). The Cas9 guide RNA provides target specificity to the complex by including a targeting segment, which includes a guide sequence (a nucleotide sequence that is complementary to a sequence of a target nucleic acid). The Cas9 protein of the complex provides the site-specific activity (e.g., cleavage activity). In other words, the Cas9 protein is guided to a target nucleic acid sequence (e.g. genomic DNA) by virtue of its association with the Cas9 guide RNA.

[0175] The “guide sequence” also referred to as the “targeting sequence” of a Cas9 guide RNA can be modified so that the Cas9 guide RNA can target a Cas9 protein to any desired sequence of any desired target nucleic acid, with the exception that the protospacer adjacent motif (PAM) sequence can be taken into account. Thus, for example, a Cas9 guide RNA can have a targeting segment with a sequence (a guide sequence) that has complementarity with (e.g., can hybridize to) a sequence in a nucleic acid in a eukaryotic cell (e.g., genomic DNA).

[0176] In some embodiments, a Cas9 guide RNA includes two separate nucleic acid molecules: an “activator” and a “targeter” and is referred to herein as a “dual Cas9 guide RNA”, a “double-molecule Cas9 guide RNA”, or a “two-molecule Cas9 guide RNA” a “dual guide RNA”, or a “dgRNA.” In some embodiments, the activator and targeter are covalently linked to one another (e.g., via intervening nucleotides) and the guide RNA is referred to as a “single guide RNA”, a “Cas9 single guide RNA”, a “single-molecule Cas9 guide RNA,” or a “one-molecule Cas9 guide RNA”, or simply “sgRNA.”

[0177] A Cas9 guide RNA comprises a crRNA-like (“CRISPR RNA”/“targeter”/“crRNA”/“crRNA repeat”) molecule and a corresponding tracrRNA-like (“trans-acting CRISPR RNA”/“activator”/“tracrRNA”) molecule. A crRNA-like molecule (targeter) comprises both the targeting segment (single stranded) of the Cas9 guide RNA and a stretch (“duplex-forming segment”) of nucleotides that forms one half of the dsRNA duplex of the protein-binding segment of the Cas9 guide RNA. A corresponding tracrRNA-like molecule (activator/tracrRNA) comprises a stretch of nucleotides (duplex-forming segment) that forms the other half of the dsRNA duplex of the protein-binding segment of the guide nucleic acid. In other words, a stretch of nucleotides of a crRNA-like molecule are complementary to and hybridize with a stretch of nucleotides of a tracrRNA-like molecule to form the dsRNA duplex of the protein-binding domain of the Cas9 guide RNA. As such, each targeter molecule can be said to have a corresponding activator molecule (which has a region that hybridizes with the targeter). The targeter molecule additionally provides the targeting segment. Thus, a targeter and an activator molecule (as a corresponding pair) hybridize to form a Cas9 guide RNA. The exact sequence of a given crRNA or tracrRNA molecule is characteristic of the species in which the RNA molecules are found. A subject dual Cas9 guide RNA can include any corresponding activator and targeter pair.

[0178] The term “activator” or “activator RNA” is used herein to mean a tracrRNA-like molecule (tracrRNA: “trans-acting CRISPR RNA”) of a Cas9 dual guide RNA (and therefore of a Cas9 single guide RNA when the “activator” and the “targeter” are linked together by, e.g., intervening nucleotides). Thus, for example, a Cas9 guide RNA (dgRNA or sgRNA) comprises an activator sequence (e.g., a tracrRNA sequence). A tracr molecule (a tracrRNA) is a naturally existing molecule that hybridizes with a CRISPR RNA molecule (a crRNA) to form a Cas9 dual guide RNA. The term “activator” is used herein to encompass naturally existing tracrRNAs, but also to encompass tracrRNAs with modifications (e.g., truncations, sequence variations, base modifications, backbone modifications, linkage modifications, etc.) where the activator retains at least one function of a tracrRNA (e.g., contributes to the dsRNA duplex to which Cas9 protein binds). In some cases the activator provides one or more stem loops that can interact with Cas9 protein. An activator can be referred to as having a tracr sequence (tracrRNA sequence) and in some cases is a tracrRNA, but the term “activator” is not limited to naturally existing tracrRNAs.

[0179] The term “targeter” or “targeter RNA” is used herein to refer to a crRNA-like molecule (crRNA: “CRISPR RNA”) of a Cas9 dual guide RNA (and therefore of a Cas9 single guide RNA when the “activator” and the “targeter” are linked together, e.g., by intervening nucleotides). Thus, for example, a Cas9 guide RNA (dgRNA or sgRNA) comprises a targeting segment (which includes nucleotides that hybridize with (are complementary to) a target nucleic acid, and a duplex-forming segment (e.g., a duplex forming segment of a crRNA, which can also be referred to as a crRNA repeat). Because the sequence of a targeting segment (the segment that hybridizes with a target sequence of a target nucleic acid) of a targeter is modified by a user to hybridize with a desired target nucleic acid, the sequence of a targeter will often be a non-naturally occurring sequence. However, the duplex-forming segment of a targeter (described in more detail below), which hybridizes with the duplex-forming segment of an activator, can include a naturally existing sequence (e.g., can include the sequence of a duplex-forming segment of a naturally existing crRNA, which can also be referred to as a crRNA repeat). Thus, the term targeter is used herein to distinguish from naturally occurring crRNAs, despite the fact that part of a targeter (e.g., the duplex-forming segment) often includes a naturally occurring sequence from a crRNA. However, the term “targeter” encompasses naturally occurring crRNAs.

[0180] A Cas9 guide RNA can also be said to include 3 parts: (i) a targeting sequence (a nucleotide sequence that hybridizes with a sequence of the target nucleic acid); (ii) an activator sequence (as described above)(in some cases, referred to as a tracr sequence); and (iii) a sequence that hybridizes to at least a portion of the activator sequence to form a double stranded duplex. A targeter has (i) and (iii); while an activator has (ii).

[0181] A Cas9 guide RNA (e.g. a dual guide RNA or a single guide RNA) can be comprised of any corresponding activator and targeter pair. In some cases, the duplex forming segments can be swapped between the activator and the targeter. In other words, in some cases, the targeter includes a sequence of nucleotides from a duplex forming segment of a tracrRNA (which sequence would normally be part of an activator) while the activator includes a sequence of nucleotides from a duplex forming segment of a crRNA (which sequence would normally be part of a targeter).

[0182] As noted above, a targeter comprises both the targeting segment (single stranded) of the Cas9 guide RNA and a stretch (“duplex-forming segment”) of nucleotides that forms one half of the dsRNA duplex of the protein-binding segment of the Cas9 guide RNA. A corresponding tracrRNA-like molecule (activator) comprises a stretch of nucleotides (a duplex-forming segment) that forms the other half of the dsRNA duplex of the protein-binding segment of the Cas9 guide RNA. In other words, a stretch of nucleotides of the targeter is complementary to and hybridizes with a stretch of nucleotides of the activator to form the dsRNA duplex of the protein-binding segment of a Cas9 guide RNA. As such, each targeter can be said to have a corresponding activator (which has a region that hybridizes with the targeter). The targeter molecule additionally provides the targeting segment. Thus, a targeter and an activator (as a corresponding pair) hybridize to form a Cas9 guide RNA. The particular sequence of a given naturally existing crRNA or tracrRNA molecule is characteristic of the species in which the RNA molecules are found. Examples of suitable activator and targeter are well known in the art.

[0183] A Cas9 guide RNA (e.g. a dual guide RNA or a single guide RNA) can be comprised of any corresponding activator and targeter pair. Non-limiting examples of nucleotide sequences that can be included in a Cas9 guide RNA (dgRNA or sgRNA) include sequences set forth in SEQ ID NOs: 827-1075, or complements thereof. For example, in some cases, sequences from SEQ ID NOs: 827-957 (which are from tracrRNAs) or complements thereof, can pair with sequences from SEQ ID NOs: 964-1075 (which are from crRNAs), or complements thereof, to form a dsRNA duplex of a protein binding segment. In some cases, the duplex-forming portion of a guide RNA suitable for use herein comprises the sequence:

(SEQ ID NO: 1366)
gttttagagctaGAAAtagcaagttaaaataaggctagtccgttatcaa
cttgaaaaagtggcaccgagtcggtgcTTTTTT,
or
(SEQ ID NO: 1367)
guuuuagagcuaGAAAuagcaaguuaaaauaaggcuaguccguuaucaa
cuugaaaaaguggcaccgagucggugcUUUUUU.

### Targeting Segment of a Cas9 Guide RNA

[0184] A subject guide RNA includes a guide sequence (i.e., a targeting sequence)(a nucleotide sequence that is complementary to a sequence (a target site) in a target nucleic acid). In other words, the targeting segment of a subject guide nucleic acid can interact with a target nucleic acid (e.g., double stranded DNA (dsDNA)) in a sequence-specific manner via hybridization (i.e., base pairing). As such, the nucleotide sequence of the targeting segment may vary (depending on the target) and can determine the location within the target nucleic acid that the Cas9 guide RNA and the target nucleic acid will interact. The targeting segment of a Cas9 guide RNA can be modified (e.g., by genetic engineering)/designed to hybridize to any desired sequence (target site) within a target nucleic acid (e.g., a eukaryotic target nucleic acid such as genomic DNA).

[0185] The targeting segment can have a length of 7 or more nucleotides (nt) (e.g., 8 or more, 9 or more, 10 or more, 12 or more, 15 or more, 20 or more, 25 or more, 30 or more, or 40 or more nucleotides). In some cases, the targeting segment can have a length of from 7 to 100 nucleotides (nt) (e.g., from 7 to 80 nt, from 7 to 60 nt, from 7 to 40 nt, from 7 to 30 nt, from 7 to 25 nt, from 7 to 22 nt, from 7 to 20 nt, from 7 to 18 nt, from 8 to 80 nt, from 8 to 60 nt, from 8 to 40 nt, from 8 to 30 nt, from 8 to 25 nt, from 8 to 22 nt, from 8 to 20 nt, from 8 to 18 nt, from 10 to 100 nt, from 10 to 80 nt, from 10 to 60 nt, from 10 to 40 nt, from 10 to 30 nt, from 10 to 25 nt, from 10 to 22 nt, from 10 to 20 nt, from 10 to 18 nt, from 12 to 100 nt, from 12 to 80 nt, from 12 to 60 nt, from 12 to 40 nt, from 12 to 30 nt, from 12 to 25 nt, from 12 to 22 nt, from 12 to 20 nt, from 12 to 18 nt, from 14 to 100 nt, from 14 to 80 nt, from 14 to 60 nt, from 14 to 40 nt, from 14 to 30 nt, from 14 to 25 nt, from 14 to 22 nt, from 14 to 20 nt, from 14 to 18 nt, from 16 to 100 nt, from 16 to 80 nt, from 16 to 60 nt, from 16 to 40 nt, from 16 to 30 nt, from 16 to 25 nt, from 16 to 22 nt, from 16 to 20 nt, from 16 to 18 nt, from 18 to 100 nt, from 18 to 80 nt, from 18 to 60 nt, from 18 to 40 nt, from 18 to 30 nt, from 18 to 25 nt, from 18 to 22 nt, or from 18 to 20 nt).

[0186] The nucleotide sequence (the targeting sequence, the guide sequence) of the targeting segment that is complementary to a nucleotide sequence (target site) of the target nucleic acid can have a length of 10 nt or more. For example, the targeting sequence of the targeting segment that is complementary to a target site of the target nucleic acid can have a length of 12 nt or more, 15 nt or more, 17 nt or more, 18 nt or more, 19 nt or more, or 20 nt or more. In some cases, the nucleotide sequence (the targeting sequence) of the targeting segment that is complementary to a nucleotide sequence (target site) of the target nucleic acid has a length of 12 nt or more. In some cases, the nucleotide sequence (the targeting sequence) of the targeting segment that is complementary to a nucleotide sequence (target site) of the target nucleic acid has a length of 17 nt or more. In some cases, the nucleotide sequence (the targeting sequence) of the targeting segment that is complementary to a nucleotide sequence (target site) of the target nucleic acid has a length of 18 nt or more.

[0187] For example, the targeting sequence (guide sequence) of the targeting segment that is complementary to a target sequence of the target nucleic acid can have a length of from 10 to 100 nucleotides (nt) (e.g., from 10 to 90 nt, from 10 to 75 nt, from 10 to 60 nt, from 10 to 50 nt, from 10 to 35 nt, from 10 to 30 nt, from 10 to 25 nt, from 10 to 22 nt, from 10 to 20 nt, from 12 to 100 nt, from 12 to 90 nt, from 12 to 75 nt, from 12 to 60 nt, from 12 to 50 nt, from 12 to 35 nt, from 12 to 30 nt, from 12 to 25 nt, from 12 to 22 nt, from 12 to 20 nt, from 15 to 100 nt, from 15 to 90 nt, from 15 to 75 nt, from 15 to 60 nt, from 15 to 50 nt, from 15 to 35 nt, from 15 to 30 nt, from 15 to 25 nt, from 15 to 22 nt, from 15 to 20 nt, from 17 to 100 nt, from 17 to 90 nt, from 17 to 75 nt, from 17 to 60 nt, from 17 to 50 nt, from 17 to 35 nt, from 17 to 30 nt, from 17 to 25 nt, from 17 to 22 nt, from 17 to 20 nt, from 18 to 100 nt, from 18 to 90 nt, from 18 to 75 nt, from 18 to 60 nt, from 18 to 50 nt, from 18 to 35 nt, from 18 to 30 nt, from 18 to 25 nt, from 18 to 22 nt, or from 18 to 20 nt). In some cases, the targeting sequence of the targeting segment that is complementary to a target sequence of the target nucleic acid has a length of from 15 nt to 30 nt. In some cases, the targeting sequence of the targeting segment that is complementary to a target sequence of the target nucleic acid has a length of from 15 nt to 25 nt. In some cases, the targeting sequence of the targeting segment that is complementary to a target sequence of the target nucleic acid has a length of from 17 nt to 30 nt. In some cases, the targeting sequence of the targeting segment that is complementary to a target sequence of the target nucleic acid has a length of from 17 nt to 25 nt. In some cases, the targeting sequence of the targeting segment that is complementary to a target sequence of the target nucleic acid has a length of from 17 nt to 22 nt. In some cases, the targeting sequence of the targeting segment that is complementary to a target sequence of the target nucleic acid has a length of from 18 nt to 30 nt. In some cases, the targeting sequence of the targeting segment that is complementary to a target sequence of the target nucleic acid has a length of from 18 nt to 25 nt. In some cases, the targeting sequence of the targeting segment that is complementary to a target sequence of the target nucleic acid has a length of from 18 nt to 22 nt. In some cases, the targeting sequence of the targeting segment that is complementary to a target site of the target nucleic acid is 20 nucleotides in length. In some cases, the targeting sequence of the targeting segment that is complementary to a target site of the target nucleic acid is 19 nucleotides in length. In some cases, the targeting sequence of the targeting segment that is complementary to a target site of the target nucleic acid is 18 nucleotides in length. In some cases, the targeting sequence of the targeting segment that is complementary to a target site of the target nucleic acid is 17 nucleotides in length.

[0188] The percent complementarity between the targeting sequence (guide sequence) of the targeting segment and the target site of the target nucleic acid can be 60% or more (e.g., 65% or more, 70% or more, 75% or more, 80% or more, 85% or more, 90% or more, 95% or more, 97% or more, 98% or more, 99% or more, or 100%). In some cases, the percent complementarity between the targeting sequence of the targeting segment and the target site of the target nucleic acid is 100% over the seven contiguous 5′-most nucleotides of the target site of the target nucleic acid. In some cases, the percent complementarity between the targeting sequence of the targeting segment and the target site of the target nucleic acid is 60% or more over about 20 contiguous nucleotides. In some cases, the percent complementarity between the targeting sequence of the targeting segment and the target site of the target nucleic acid is 100% over the fourteen contiguous 5′-most nucleotides of the target site of the target nucleic acid and as low as 0% or more over the remainder. In such a case, the targeting sequence can be considered to be 14 nucleotides in length. In some cases, the percent complementarity between the targeting sequence of the targeting segment and the target site of the target nucleic acid is 100% over the seven contiguous 5′-most nucleotides of the target site of the target nucleic acid and as low as 0% or more over the remainder.

[0189] In some cases, the percent complementarity between the targeting sequence of the targeting segment and the target site of the target nucleic acid is 100% over the 7 contiguous 5′-most nucleotides of the target site of the target nucleic acid (which can be complementary to the 3′-most nucleotides of the targeting sequence of the Cas9 guide RNA). In some cases, the percent complementarity between the targeting sequence of the targeting segment and the target site of the target nucleic acid is 100% over the 8 contiguous 5′-most nucleotides of the target site of the target nucleic acid (which can be complementary to the 3′-most nucleotides of the targeting sequence of the Cas9 guide RNA). In some cases, the percent complementarity between the targeting sequence of the targeting segment and the target site of the target nucleic acid is 100% over the 9 contiguous 5′-most nucleotides of the target site of the target nucleic acid (which can be complementary to the 3′-most nucleotides of the targeting sequence of the Cas9 guide RNA). In some cases, the percent complementarity between the targeting sequence of the targeting segment and the target site of the target nucleic acid is 100% over the 10 contiguous 5′-most nucleotides of the target site of the target nucleic acid (which can be complementary to the 3′-most nucleotides of the targeting sequence of the Cas9 guide RNA). In some cases, the percent complementarity between the targeting sequence of the targeting segment and the target site of the target nucleic acid is 100% over the 17 contiguous 5′-most nucleotides of the target site of the target nucleic acid (which can be complementary to the 3′-most nucleotides of the targeting sequence of the Cas9 guide RNA). In some cases, the percent complementarity between the targeting sequence of the targeting segment and the target site of the target nucleic acid is 100% over the 18 contiguous 5′-most nucleotides of the target site of the target nucleic acid (which can be complementary to the 3′-most nucleotides of the targeting sequence of the Cas9 guide RNA). In some cases, the percent complementarity between the targeting sequence of the targeting segment and the target site of the target nucleic acid is 60% or more (e.g., e.g., 65% or more, 70% or more, 75% or more, 80% or more, 85% or more, 90% or more, 95% or more, 97% or more, 98% or more, 99% or more, or 100%) over 20 contiguous nucleotides. In some cases, the percent complementarity between the targeting sequence of the targeting segment and the target site of the target nucleic acid is 60% or more (e.g., e.g., 65% or more, 70% or more, 75% or more, 80% or more, 85% or more, 90% or more, 95% or more, 97% or more, 98% or more, 99% or more, or 100%) over 17 contiguous nucleotides.

[0190] In some cases, the percent complementarity between the targeting sequence of the targeting segment and the target site of the target nucleic acid is 100% over the 7 contiguous 5′-most nucleotides of the target site of the target nucleic acid and as low as 0% or more over the remainder. In such a case, the targeting sequence can be considered to be 7 nucleotides in length. In some cases, the percent complementarity between the targeting sequence of the targeting segment and the target site of the target nucleic acid is 100% over the 8 contiguous 5′-most nucleotides of the target site of the target nucleic acid and as low as 0% or more over the remainder. In such a case, the targeting sequence can be considered to be 8 nucleotides in length. In some cases, the percent complementarity between the targeting sequence of the targeting segment and the target site of the target nucleic acid is 100% over the 9 contiguous 5′-most nucleotides of the target site of the target nucleic acid and as low as 0% or more over the remainder. In such a case, the targeting sequence can be considered to be 9 nucleotides in length. In some cases, the percent complementarity between the targeting sequence of the targeting segment and the target site of the target nucleic acid is 100% over the 10 contiguous 5′-most nucleotides of the target site of the target nucleic acid and as low as 0% or more over the remainder. In such a case, the targeting sequence can be considered to be 10 nucleotides in length. In some cases, the percent complementarity between the targeting sequence of the targeting segment and the target site of the target nucleic acid is 100% over the 11 contiguous 5′-most nucleotides of the target site of the target nucleic acid and as low as 0% or more over the remainder. In such a case, the targeting sequence can be considered to be 11 nucleotides in length. In some cases, the percent complementarity between the targeting sequence of the targeting segment and the target site of the target nucleic acid is 100% over the 12 contiguous 5′-most nucleotides of the target site of the target nucleic acid and as low as 0% or more over the remainder. In such a case, the targeting sequence can be considered to be 12 nucleotides in length. In some cases, the percent complementarity between the targeting sequence of the targeting segment and the target site of the target nucleic acid is 100% over the 13 contiguous 5′-most nucleotides of the target site of the target nucleic acid and as low as 0% or more over the remainder. In such a case, the targeting sequence can be considered to be 13 nucleotides in length. In some cases, the percent complementarity between the targeting sequence of the targeting segment and the target site of the target nucleic acid is 100% over the 14 contiguous 5′-most nucleotides of the target site of the target nucleic acid and as low as 0% or more over the remainder. In such a case, the targeting sequence can be considered to be 14 nucleotides in length. In some cases, the percent complementarity between the targeting sequence of the targeting segment and the target site of the target nucleic acid is 100% over the 17 contiguous 5′-most nucleotides of the target site of the target nucleic acid and as low as 0% or more over the remainder. In such a case, the targeting sequence can be considered to be 17 nucleotides in length. In some cases, the percent complementarity between the targeting sequence of the targeting segment and the target site of the target nucleic acid is 100% over the 18 contiguous 5′-most nucleotides of the target site of the target nucleic acid and as low as 0% or more over the remainder. In such a case, the targeting sequence can be considered to be 18 nucleotides in length.

[0191] Examples of various Cas9 proteins and Cas9 guide RNAs (as well as information regarding requirements related to protospacer adjacent motif (PAM) sequences present in targeted nucleic acids) can be found in the art, for example, see Jinek et al., Science. 2012 Aug. 17; 337(6096):816-21; Chylinski et al., RNA Biol. 2013 May; 10(5):726-37; Ma et al., Biomed Res Int. 2013; 2013:270805; Hou et al., Proc Natl Acad Sci USA. 2013 Sep. 24; 110(39):15644-9; Jinek et al., Elife. 2013; 2:e00471; Pattanayak et al., Nat Biotechnol. 2013 September; 31(9):839-43; Qi et al, Cell. 2013 Feb. 28; 152(5):1173-83; Wang et al., Cell. 2013 May 9; 153(4):910-8; Auer et al., Genome Res. 2013 Oct. 31; Chen et al., Nucleic Acids Res. 2013 Nov. 1; 41(20):e19; Cheng et al., Cell Res. 2013 October; 23(10):1163-71; Cho et al., Genetics. 2013 November; 195(3):1177-80; DiCarlo et al., Nucleic Acids Res. 2013 April; 41(7):4336-43; Dickinson et al., Nat Methods. 2013 October; 10(10): 1028-34; Ebina et al., Sci Rep. 2013; 3:2510; Fujii et. al, Nucleic Acids Res. 2013 Nov. 1; 41(20):e187; Hu et al., Cell Res. 2013 November; 23(11):1322-5; Jiang et al., Nucleic Acids Res. 2013 Nov. 1; 41(20):e188; Larson et al., Nat Protoc. 2013 November; 8(11):2180-96; Mali et. at., Nat Methods. 2013 October; 10(10):957-63; Nakayama et al., Genesis. 2013 December; 51(12):835-43; Ran et al., Nat Protoc. 2013 November; 8(11):2281-308; Ran et al., Cell. 2013 Sep. 12; 154(6):1380-9; Upadhyay et al., G3 (Bethesda). 2013 Dec. 9; 3(12):2233-8; Walsh et al., Proc Natl Acad Sci USA. 2013 Sep. 24; 110(39):15514-5; Xie et al., Mol Plant. 2013 Oct. 9; Yang et al., Cell. 2013 Sep. 12; 154(6):1370-9; Briner et al., Mol Cell. 2014 Oct. 23; 56(2):333-9; and U.S. patents and patent applications: U.S. Pat. Nos. 8,906,616; 8,895,308; 8,889,418; 8,889,356; 8,871,445; 8,865,406; 8,795,965; 8,771,945; 8,697,359; 20140068797; 20140170753; 20140179006; 20140179770; 20140186843; 20140186919; 20140186958; 20140189896; 20140227787; 20140234972; 20140242664; 20140242699; 20140242700; 20140242702; 20140248702; 20140256046; 20140273037; 20140273226; 20140273230; 20140273231; 20140273232; 20140273233; 20140273234; 20140273235; 20140287938; 20140295556; 20140295557; 20140298547; 20140304853; 20140309487; 20140310828; 20140310830; 20140315985; 20140335063; 20140335620; 20140342456; 20140342457; 20140342458; 20140349400; 20140349405; 20140356867; 20140356956; 20140356958; 20140356959; 20140357523; 20140357530; 20140364333; and 20140377868; all of which are hereby incorporated by reference in their entirety.

### Guide RNAs Corresponding to Type V and Type VI CRISPR/Cas Endonucleases (e.g., Cpf1 Guide RNA)

[0192] A guide RNA that binds to a type V or type VI CRISPR/Cas protein (e.g., Cpf1, C2c1, C2c2, C2c3), and targets the complex to a specific location within a target nucleic acid is referred to herein generally as a “type V or type VI CRISPR/Cas guide RNA”. An example of a more specific term is a “Cpf1 guide RNA.”

[0193] A type V or type VI CRISPR/Cas guide RNA (e.g., cpf1 guide RNA) can have a total length of from 30 nucleotides (nt) to 200 nt, e.g., from 30 nt to 180 nt, from 30 nt to 160 nt, from 30 nt to 150 nt, from 30 nt to 125 nt, from 30 nt to 100 nt, from 30 nt to 90 nt, from 30 nt to 80 nt, from 30 nt to 70 nt, from 30 nt to 60 nt, from 30 nt to 50 nt, from 50 nt to 200 nt, from 50 nt to 180 nt, from 50 nt to 160 nt, from 50 nt to 150 nt, from 50 nt to 125 nt, from 50 nt to 100 nt, from 50 nt to 90 nt, from 50 nt to 80 nt, from 50 nt to 70 nt, from 50 nt to 60 nt, from 70 nt to 200 nt, from 70 nt to 180 nt, from 70 nt to 160 nt, from 70 nt to 150 nt, from 70 nt to 125 nt, from 70 nt to 100 nt, from 70 nt to 90 nt, or from 70 nt to 80 nt). In some cases, a type V or type VI CRISPR/Cas guide RNA (e.g., cpf1 guide RNA) has a total length of at least 30 nt (e.g., at least 40 nt, at least 50 nt, at least 60 nt, at least 70 nt, at least 80 nt, at least 90 nt, at least 100 nt, or at least 120 nt,).

[0194] In some cases, a Cpf1 guide RNA has a total length of 35 nt, 36 nt, 37 nt, 38 nt, 39 nt, 40 nt, 41 nt, 42 nt, 43 nt, 44 nt, 45 nt, 46 nt, 47 nt, 48 nt, 49 nt, or 50 nt.

[0195] Like a Cas9 guide RNA, a type V or type VI CRISPR/Cas guide RNA (e.g., cpf1 guide RNA) can include a target nucleic acid-binding segment and a duplex-forming region (e.g., in some cases formed from two duplex-forming segments, i.e., two stretches of nucleotides that hybridize to one another to form a duplex).

[0196] The target nucleic acid-binding segment of a type V or type VI CRISPR/Cas guide RNA (e.g., cpf1 guide RNA) can have a length of from 15 nt to 30 nt, e.g., 15 nt, 16 nt, 17 nt, 18 nt, 19 nt, 20 nt, 21 nt, 22 nt, 23 nt, 24 nt, 25 nt, 26 nt, 27 nt, 28 nt, 29 nt, or 30 nt. In some cases, the target nucleic acid-binding segment has a length of 23 nt. In some cases, the target nucleic acid-binding segment has a length of 24 nt. In some cases, the target nucleic acid-binding segment has a length of 25 nt.

[0197] The guide sequence of a type V or type VI CRISPR/Cas guide RNA (e.g., cpf1 guide RNA) can have a length of from 15 nt to 30 nt (e.g., 15 to 25 nt, 15 to 24 nt, 15 to 23 nt, 15 to 22 nt, 15 to 21 nt, 15 to 20 nt, 15 to 19 nt, 15 to 18 nt, 17 to 30 nt, 17 to 25 nt, 17 to 24 nt, 17 to 23 nt, 17 to 22 nt, 17 to 21 nt, 17 to 20 nt, 17 to 19 nt, 17 to 18 nt, 18 to 30 nt, 18 to 25 nt, 18 to 24 nt, 18 to 23 nt, 18 to 22 nt, 18 to 21 nt, 18 to 20 nt, 18 to 19 nt, 19 to 30 nt, 19 to 25 nt, 19 to 24 nt, 19 to 23 nt, 19 to 22 nt, 19 to 21 nt, 19 to 20 nt, 20 to 30 nt, 20 to 25 nt, 20 to 24 nt, 20 to 23 nt, 20 to 22 nt, 20 to 21 nt, 15 nt, 16 nt, 17 nt, 18 nt, 19 nt, 20 nt, 21 nt, 22 nt, 23 nt, 24 nt, 25 nt, 26 nt, 27 nt, 28 nt, 29 nt, or 30 nt). In some cases, the guide sequence has a length of 17 nt. In some cases, the guide sequence has a length of 18 nt. In some cases, the guide sequence has a length of 19 nt. In some cases, the guide sequence has a length of 20 nt. In some cases, the guide sequence has a length of 21 nt. In some cases, the guide sequence has a length of 22 nt. In some cases, the guide sequence has a length of 23 nt. In some cases, the guide sequence has a length of 24 nt.

[0198] The guide sequence of a type V or type VI CRISPR/Cas guide RNA (e.g., cpf1 guide RNA) can have 100% complementarity with a corresponding length of target nucleic acid sequence. The guide sequence can have less than 100% complementarity with a corresponding length of target nucleic acid sequence. For example, the guide sequence of a type V or type VI CRISPR/Cas guide RNA (e.g., cpf1 guide RNA) can have 1, 2, 3, 4, or 5 nucleotides that are not complementary to the target nucleic acid sequence. For example, in some cases, where a guide sequence has a length of 25 nucleotides, and the target nucleic acid sequence has a length of 25 nucleotides, in some cases, the target nucleic acid-binding segment has 100% complementarity to the target nucleic acid sequence. As another example, in some cases, where a guide sequence has a length of 25 nucleotides, and the target nucleic acid sequence has a length of 25 nucleotides, in some cases, the target nucleic acid-binding segment has 1 non-complementary nucleotide and 24 complementary nucleotides with the target nucleic acid sequence. As another example, in some cases, where a guide sequence has a length of 25 nucleotides, and the target nucleic acid sequence has a length of 25 nucleotides, in some cases, the target nucleic acid-binding segment has 2 non-complementary nucleotides and 23 complementary nucleotides with the target nucleic acid sequence.

[0199] The duplex-forming segment of a type V or type VI CRISPR/Cas guide RNA (e.g., cpf1 guide RNA) (e.g., of a targeter RNA or an activator RNA) can, in some cases, have a length of from 15 nt to 25 nt (e.g., 15 nt, 16 nt, 17 nt, 18 nt, 19 nt, 20 nt, 21 nt, 22 nt, 23 nt, 24 nt, or 25 nt).

[0200] In some cases, the RNA duplex of a type V or type VI CRISPR/Cas guide RNA (e.g., cpf1 guide RNA) can have a length of from 5 base pairs (bp) to 40 bp (e.g., from 5 to 35 bp, 5 to 30 bp, 5 to 25 bp, 5 to 20 bp, 5 to 15 bp, 5-12 bp, 5-10 bp, 5-8 bp, 6 to 40 bp, 6 to 35 bp, 6 to 30 bp, 6 to 25 bp, 6 to 20 bp, 6 to 15 bp, 6 to 12 bp, 6 to 10 bp, 6 to 8 bp, 7 to 40 bp, 7 to 35 bp, 7 to 30 bp, 7 to 25 bp, 7 to 20 bp, 7 to 15 bp, 7 to 12 bp, 7 to 10 bp, 8 to 40 bp, 8 to 35 bp, 8 to 30 bp, 8 to 25 bp, 8 to 20 bp, 8 to 15 bp, 8 to 12 bp, 8 to 10 bp, 9 to 40 bp, 9 to 35 bp, 9 to 30 bp, 9 to 25 bp, 9 to 20 bp, 9 to 15 bp, 9 to 12 bp, 9 to 10 bp, 10 to 40 bp, 10 to 35 bp, 10 to 30 bp, 10 to 25 bp, 10 to 20 bp, 10 to 15 bp, or 10 to 12 bp).

[0201] As an example, a duplex-forming segment of a Cpf1 guide RNA can comprise a nucleotide sequence selected from (5′ to 3′): AAUUUCUACUGUUGUAGAU (SEQ ID NO: 1093), AAUUUCUGCUGUUGCAGAU (SEQ ID NO: 1094), AAUUUCCACUGUUGUGGAU (SEQ ID NO: 1095), AAUUCCUACUGUUGUAGGU (SEQ ID NO: 1096), AAUUUCUACUAUUGUAGAU (SEQ ID NO: 1097), AAUUUCUACUGCUGUAGAU (SEQ ID NO: 1098), AAUUUCUACUUUGUAGAU (SEQ ID NO: 1099), and AAUUUCUACUUGUAGAU (SEQ ID NO: 1100). The guide sequence can then follow (5′ to 3′) the duplex forming segment.

[0202] A non-limiting example of an activator RNA (e.g. tracrRNA) of a C2c1 guide RNA (dual guide or single guide) is an RNA that includes the nucleotide sequence GAAUUUUUCAACGGGUGUGCCAAUGGCCACUUUCCAGGUGGCAAAGCCCGUUGA GCUUCUCAAAAAG (SEQ ID NO: 1101). In some cases, a C2c1 guide RNA (dual guide or single guide) is an RNA that includes the nucleotide sequence In some cases, a C2c1 guide RNA (dual guide or single guide) is an RNA that includes the nucleotide sequence GUCUAGAGGACAGAAUUUUUCAACGGGUGUGCCAAUGGCCACUUUCCAGGUGGC AAAGCCCGUUGAGCUUCUCAAAAAG (SEQ ID NO: 1102). In some cases, a C2c1 guide RNA (dual guide or single guide) is an RNA that includes the nucleotide sequence UCUAGAGGACAGAAUUUUUCAACGGGUGUGCCAAUGGCCACUUUCCAGGUGGCA AAGCCCGUUGAGCUUCUCAAAAAG (SEQ ID NO: 1103). A non-limiting example of an activator RNA (e.g. tracrRNA) of a C2c1 guide RNA (dual guide or single guide) is an RNA that includes the nucleotide sequence ACUUUCCAGGCAAAGCCCGUUGAGCUUCUCAAAAAG (SEQ ID NO: 1104). In some cases, a duplex forming segment of a C2c1 guide RNA (dual guide or single guide) of an activator RNA (e.g. tracrRNA) includes the nucleotide sequence AGCUUCUCA (SEQ ID NO: 1105) or the nucleotide sequence GCUUCUCA (SEQ ID NO: 1106) (the duplex forming segment from a naturally existing tracrRNA.

[0203] A non-limiting example of a targeter RNA (e.g. crRNA) of a C2c1 guide RNA (dual guide or single guide) is an RNA with the nucleotide sequence CUGAGAAGUGGCACNNNNNNNNNNNNNNNNNNNN (SEQ ID NO: 1107), where the Ns represent the guide sequence, which will vary depending on the target sequence, and although 20 Ns are depicted a range of different lengths are acceptable. In some cases, a duplex forming segment of a C2c1 guide RNA (dual guide or single guide) of a targeter RNA (e.g. crRNA) includes the nucleotide sequence CUGAGAAGUGGCAC (SEQ ID NO: 1108) or includes the nucleotide sequence CUGAGAAGU (SEQ ID NO: 1109) or includes the nucleotide sequence UGAGAAGUGGCAC (SEQ ID NO: 1110) or includes the nucleotide sequence UGAGAAGU (SEQ ID NO: 1111).

[0204] Examples and guidance related to type V or type VI CRISPR/Cas endonucleases and guide RNAs (as well as information regarding requirements related to protospacer adjacent motif (PAM) sequences present in targeted nucleic acids) can be found in the art, for example, see Zetsche et al, Cell. 2015 Oct. 22; 163(3):759-71; Makarova et al, Nat Rev Microbiol. 2015 November; 13(11):722-36; and Shmakov et al., Mol Cell. 2015 Nov. 5; 60(3):385-97.

### Target Cells

[0205] A target nucleic acid (e.g., target genomic DNA) can be located within a eukaryotic cell, for example, inside of a eukaryotic cell in vitro, inside of a eukaryotic cell in vivo, inside of a eukaryotic cell ex vivo. Thus, in some cases, a target cell (e.g., a human cell) of a subject method (a cell into which a class 2 CRISPR/Cas endonuclease and a pair of corresponding CRISPR/Cas guide RNAs can be introduced) is in vitro. In some cases, a target cell (e.g., a human cell) of a subject method (a cell into which a class 2 CRISPR/Cas endonuclease and a pair of corresponding CRISPR/Cas guide RNAs can be introduced) is ex vivo. In some cases, a target cell (e.g., a human cell) of a subject method (a cell into which a class 2 CRISPR/Cas endonuclease and a pair of corresponding CRISPR/Cas guide RNAs can be introduced) is in vivo.

[0206] The subject kits, compositions, and methods can be used for research and therapeutic applications. As such, any eukaryotic cell having a region that corresponds to the region of intron 44 through of intron 55 of the human dystrophin gene can be used.

[0207] In some cases a target cell (a cell into which a class 2 CRISPR/Cas endonuclease and a pair of corresponding CRISPR/Cas guide RNAs can be introduced) is a cell of a vertebrate animal (e.g., fish, amphibian, reptile, bird, mammal); a cell of a mammal (e.g., a cell of a rodent such as a mouse or rat, a cell of a non-human primate, a cell of a human, etc.); and the like. In some cases a target cell (a cell into which a class 2 CRISPR/Cas endonuclease and a pair of corresponding CRISPR/Cas guide RNAs can be introduced) is a mammalian cell (e.g., a human cell).

[0208] Any type of cell may be of interest (e.g. a stem cell, e.g. an embryonic stem (ES) cell, an induced pluripotent stem (iPS) cell, a hematopoietic stem cell, a germ cell (e.g., an oocyte, a sperm, an oogonia, a spermatogonia, etc.), a somatic cell, a muscle cell, an in vitro or in vivo embryonic cell of an embryo at any stage, e.g., a 1-cell, 2-cell, 4-cell, 8-cell, etc. stage zebrafish embryo; etc.). Cells may be from established cell lines or they may be primary cells, where “primary cells”, “primary cell lines”, and “primary cultures” are used interchangeably herein to refer to cells and cells cultures that have been derived from a subject and allowed to grow in vitro for a limited number of passages, i.e. splittings, of the culture. For example, primary cultures are cultures that may have been passaged 0 times, 1 time, 2 times, 4 times, 5 times, 10 times, or 15 times, but not enough times go through the crisis stage.

[0209] If the cell is a primary cell (e.g., a cell ex vivo), it can be harvested from an individual by any convenient method. For example, leukocytes may be conveniently harvested by apheresis, leukocytapheresis, density gradient separation, etc., while cells from tissues such as skin, muscle, bone marrow, spleen, liver, pancreas, lung, intestine, stomach, etc. can be conveniently harvested by biopsy.

[0210] In some cases, the cell is a pericyte. A pericyte is a multipotent stem cell that is located within the blood vessels of skeletal muscle. Pericytes can be delivered systemically can cross the vascular barrier. Once past the vasculature, pericytes can fuse and form myotubes. Pericytes can be injected arterially, crossing through arterial walls into muscle, where they can differentiate into functional muscle.

[0211] Thus, in some cases, a target cell (a cell into which a class 2 CRISPR/Cas endonuclease and a pair of corresponding CRISPR/Cas guide RNAs can be introduced) is a pericyte (e.g., see Dellavalle et al., Nat Cell Biol. 2007 March; 9(3):255-67). In some cases, the cell is a type 2 pericyte (e.g., which can form myotubes and can be characterized by positive expression for nestin (PDGFRβ⁺CD146⁺NG2⁺)). In some cases, is a muscle stem cell. In some cases, the cell is a myogenic precursor cell.

[0212] The findings of the inventors (e.g., see the examples below) can be used for stem cell therapy of DMD. For example, pericyte-derived cells can be extracted, grown in culture, and then these cells can be injected into the blood stream where they can find their way into injured regions of skeletal muscle.

[0213] In some cases, a subject method includes (after introducing a class 2 CRISPR/Cas endonuclease and corresponding first and second CRISPR/Cas guide RNAs into a target cell), a step of transplanting the cell into an individual (e.g., an individual having DMD). In some cases, the cell is autologous to the individual (e.g., cell is harvested from an individual with DMD, the subject components are introduced into the cell to generate a genomic deletion as described elsewhere herein, and the ‘corrected’ cell and/or cells derived from the ‘corrected’ cell, e.g., progeny cells, is introduced into the individual).

### Nucleic Acids

[0214] As noted above, the subject components (e.g., (a) a class 2 CRISPR/Cas endonuclease, e.g., Cas9, Cpf1, etc.; and/or (b) first and second corresponding guide RNAs, e.g., Cas9 guide RNAs, a Cpf1 guide RNAs, etc.) can be delivered to a cell (introduced into a cell) as DNA, RNA, or protein. Thus, in some cases, a subject method or composition or kit includes one or more nucleic acids (RNA or DNA) encoding one or more of: (i) a class 2 CRISPR/Cas endonuclease (e.g., a Cas9 protein), (ii) a first CRISPR/Cas guide RNA (that hybridizes to intron 44, e.g., as described elsewhere herein), and (iii) a second CRISPR/Cas guide RNA (that hybridizes to intron 55, e.g., as described elsewhere herein). In some cases, one nucleic acid (e.g., an expression vector) encodes the first and second CRISPR/Cas guide RNAs. In some cases, the same nucleic acid (e.g., expression vector) also encodes the class 2 CRISPR/Cas endonuclease.

[0215] Many vectors, e.g. plasmids, cosmids, minicircles, phage, viruses, etc., useful for transferring nucleic acids into target cells are available. The vectors comprising the nucleic acid(s) may be maintained episomally, e.g. as plasmids, minicircle DNAs, viruses such cytomegalovirus, adenovirus, etc., or they may be integrated into the target cell genome, through homologous recombination or random integration, e.g. retrovirus-derived vectors such as MMLV, HIV-1, ALV, etc.

[0216] Vectors may be provided directly to the subject cells. In other words, cells can be contacted with one or more nucleic acids (e.g., vectors) encoding one or more of: (i) the first CRISPR/Cas guide RNA, (ii) the second CRISPR/Cas guide RNA, and (iii) the class 2 CRISPR/Cas endonuclease, such that the vectors are taken up by the cells.

[0217] Methods for contacting cells with nucleic acid vectors that are plasmids, including electroporation, calcium chloride transfection, microinjection, and lipofection are known in the art. For viral vector delivery, the cells are contacted with viral particles comprising the nucleic acid. Retroviruses, for example, lentiviruses, are particularly suitable to the method of the invention. Commonly used retroviral vectors are “defective”, i.e. unable to produce viral proteins required for productive infection. Rather, replication of the vector requires growth in a packaging cell line. To generate viral particles comprising nucleic acids of interest, the retroviral nucleic acids comprising the nucleic acid are packaged into viral capsids by a packaging cell line. Different packaging cell lines provide a different envelope protein (ecotropic, amphotropic or xenotropic) to be incorporated into the capsid, this envelope protein determining the specificity of the viral particle for the cells (ecotropic for murine and rat; amphotropic for most mammalian cell types including human, dog and mouse; and xenotropic for most mammalian cell types except murine cells). The appropriate packaging cell line may be used to ensure that the cells are targeted by the packaged viral particles. Methods of introducing the retroviral vectors comprising the nucleic acid encoding the reprogramming factors into packaging cell lines and of collecting the viral particles that are generated by the packaging lines are well known in the art. Nucleic acids can also introduced by direct micro-injection (e.g., injection of RNA into a zebrafish embryo).

[0218] Vectors used for providing the nucleic acids encoding the first and second CRISPR/Cas guide RNAs, and/or a class 2 CRISPR/Cas endonuclease, to target cells can include suitable promoters for driving expression, that is, transcriptional activation, of the nucleic acid of interest. In other words, the nucleic acid of interest (a nucleotide sequence encoding the first CRISPR/Cas guide RNA, a nucleotide sequence encoding the second CRISPR/Cas guide RNA, a nucleotide sequence encoding a class 2 CRISPR/Cas endonuclease, etc.) can be operably linked to a promoter (e.g., a promoter operable in the target cell). This may include ubiquitously acting promoters, for example, the CMV-β-actin promoter, the EF-1 alpha promoter, and the like, or inducible promoters, such as promoters that are active in particular cell populations or that respond to the presence of drugs such as tetracycline. By transcriptional activation, it is intended that transcription will be increased above basal levels in the target cell by at least about 10 fold, by at least about 100 fold, more usually by at least about 1000 fold. Expression vectors may include nucleic acid sequences that encode for selectable markers in the target cells, so as to identify cells that have taken up the introduced nucleic acid.

[0219] As noted above, a promoter can be a constitutively active promoter (i.e., a promoter that is constitutively in an active/“ON” state), it may be an inducible promoter (i.e., a promoter whose state, active/“ON” or inactive/“OFF”, is controlled by an external stimulus, e.g., the presence of a particular temperature, compound, or protein.), it may be a spatially restricted promoter (i.e., transcriptional control element, enhancer, etc.)(e.g., tissue specific promoter, cell type specific promoter, etc.), and it may be a temporally restricted promoter (i.e., the promoter is in the “ON” state or “OFF” state during specific stages of embryonic development or during specific stages of a biological process, e.g., hair follicle cycle in mice).

[0220] Tissue-specific promoters are known in the art. Non-limiting examples of tissue-specific promoters are muscle cell-specific promoters. Suitable muscle-specific promoters include, e.g., a desmin promoter; an a-myosin heavy chain promoter; a myosin light chain-2 promoter; a cardiac troponin C promoter; a muscle creatine kinase promoter; an α-actinin promoter; a cardiac troponin I promoter; and the like. See, e.g., Pacak et al. (2008) Genet. Vaccines Ther. 6:13.

[0221] Suitable promoters can be derived from viruses and can therefore be referred to as viral promoters, or they can be derived from any organism, including prokaryotic or eukaryotic organisms. Suitable promoters can be used to drive expression by any RNA polymerase (e.g., pol I, pol II, pol III). Exemplary promoters include, but are not limited to the SV40 early promoter, mouse mammary tumor virus long terminal repeat (LTR) promoter; adenovirus major late promoter (Ad MLP); a herpes simplex virus (HSV) promoter, a cytomegalovirus (CMV) promoter such as the CMV immediate early promoter region (CMVIE), a rous sarcoma virus (RSV) promoter, a human U6 small nuclear promoter (U6) (Miyagishi et al., Nature Biotechnology 20, 497-500 (2002)), an enhanced U6 promoter (e.g., Xia et al., Nucleic Acids Res. 2003 Sep. 1; 31(17)), a human H1 promoter (H1), and the like.

[0222] Examples of inducible promoters include, but are not limited to T7 RNA polymerase promoter, T3 RNA polymerase promoter, Isopropyl-beta-D-thiogalactopyranoside (IPTG)-regulated promoter, lactose induced promoter, heat shock promoter, Tetracycline-regulated promoter, Steroid-regulated promoter, Metal-regulated promoter, estrogen receptor-regulated promoter, etc. Inducible promoters can therefore be regulated by molecules including, but not limited to, doxycycline; RNA polymerase, e.g., T7 RNA polymerase; an estrogen receptor; an estrogen receptor fusion; etc.

[0223] As noted above, a class 2 CRISPR/Cas endonuclease, and/or a CRISPR/Cas guide RNA may be introduced into cells as RNA. Methods of introducing RNA into cells are known in the art and may include, for example, direct injection, transfection, or any other method used for the introduction of DNA.

[0224] A class 2 CRISPR/Cas endonuclease (e.g., a Cas9 protein) may be introduced into cells as a polypeptide (e.g., in some cases complexed with a guide RNA, thus forming an RNP). Such a polypeptide may optionally be fused to a polypeptide domain that increases solubility of the product. The domain may be linked to the polypeptide through a defined protease cleavage site, e.g. a TEV sequence, which is cleaved by TEV protease. The linker may also include one or more flexible sequences, e.g. from 1 to 10 glycine residues. In some embodiments, the cleavage of the fusion protein is performed in a buffer that maintains solubility of the product, e.g. in the presence of from 0.5 to 2 M urea, in the presence of polypeptides and/or polynucleotides that increase solubility, and the like. Domains of interest include endosomolytic domains, e.g. influenza HA domain; and other polypeptides that aid in production, e.g. IF2 domain, GST domain, GRPE domain, and the like. The polypeptide may be formulated for improved stability. For example, the peptides may be PEGylated, where the polyethyleneoxy group provides for enhanced lifetime in the blood stream.

[0225] Additionally or alternatively, a class 2 CRISPR/Cas endonuclease such as a Cas9 protein may be fused to a polypeptide permeant domain to promote uptake by the cell. A number of permeant domains are known in the art and may be used in the non-integrating polypeptides of the present invention, including peptides, peptidomimetics, and non-peptide carriers. For example, a permeant peptide may be derived from the third alpha helix of Drosophila melanogaster transcription factor Antennapaedia, referred to as penetratin, which comprises the amino acid sequence RQIKIWFQNRRMKWKK (SEQ ID NO: 1080). As another example, the permeant peptide comprises the HIV-1 tat basic region amino acid sequence, which may include, for example, amino acids 49-57 of naturally-occurring tat protein. Other permeant domains include poly-arginine motifs, for example, the region of amino acids 34-56 of HIV-1 rev protein, nona-arginine, octa-arginine, and the like. (See, for example, Futaki et al. (2003) Curr Protein Pept Sci. 2003 April; 4(2): 87-9 and 446; and Wender et al. (2000) Proc. Natl. Acad. Sci. U.S.A 2000 Nov. 21; 97(24):13003-8; published U.S. Patent applications 20030220334; 20030083256; 20030032593; and 20030022831, herein specifically incorporated by reference for the teachings of translocation peptides and peptoids). The nona-arginine (R9) sequence is one of the more efficient PTDs that have been characterized (Wender et al. 2000; Uemura et al. 2002). The site at which the fusion is made may be selected in order to optimize the biological activity, secretion or binding characteristics of the polypeptide. The optimal site will be determined by routine experimentation.

[0226] A class 2 CRISPR/Cas endonuclease (e.g., a Cas9 protein) can be produced in vitro or by eukaryotic cells or by prokaryotic cells, and it may be further processed by unfolding, e.g. heat denaturation, DTT reduction, etc. and may be further refolded, using methods known in the art.

[0227] Modifications of interest that do not alter primary sequence include chemical derivatization of polypeptides, e.g., acylation, acetylation, carboxylation, amidation, etc. Also included are modifications of glycosylation, e.g. those made by modifying the glycosylation patterns of a polypeptide during its synthesis and processing or in further processing steps; e.g. by exposing the polypeptide to enzymes which affect glycosylation, such as mammalian glycosylating or deglycosylating enzymes. Also embraced are sequences that have phosphorylated amino acid residues, e.g. phosphotyrosine, phosphoserine, or phosphothreonine.

[0228] A class 2 CRISPR/Cas endonuclease, e.g., a Cas9 protein, can be isolated and purified, e.g., in accordance with conventional methods of recombinant synthesis. A lysate may be prepared of the expression host and the lysate purified using HPLC, exclusion chromatography, gel electrophoresis, affinity chromatography, or other purification technique. For the most part, the compositions which are used can comprise at least 20% by weight of the desired product, more usually at least 75% by weight, e.g., at least 95% by weight, and for therapeutic purposes, e.g., at least 99.5% by weight, in relation to contaminants related to the method of preparation of the product and its purification. The percentages can be based upon total protein.

[0229] The components of the methods and compositions (and kits) described herein can be introduced into a cell using any convenient method. For example, a genome targeting composition can be introduced into cells in various forms, including: (i) as an RNP (e.g., comprising a class 2 CRISPR/Cas endonuclease, e.g., a Cas9 protein, and corresponding first and second guide RNAs, e.g., Cas9 guide RNAs); (ii) as protein (e.g., a class 2 CRISPR/Cas endonuclease); (iii) as RNA (e.g., a CRISPR/Cas guide RNA, an RNA encoding a class 2 CRISPR/Cas endonuclease, etc.); (iv) as DNA (e.g., a DNA encoding a genome editing endonuclease, a DNA encoding CRISPR/Cas guide RNAs, etc.); and (v) any combination thereof.

[0230] Examples of ways to introduce the above components include but are not limited to: viral or bacteriophage infection, transfection, conjugation, protoplast fusion, lipofection, electroporation, calcium phosphate precipitation, polyethyleneimine (PEI)-mediated transfection, DEAE-dextran mediated transfection, liposome-mediated transfection, particle gun technology, calcium phosphate precipitation, direct micro injection, nanoparticle-mediated nucleic acid delivery (see, e.g., Panyam et., al Adv Drug Deliv Rev. 2012 Sep. 13. pii: S0169-409X(12)00283-9. doi: 10.1016/j.addr.2012.09.023), and the like.

[0231] The components can be introduced into a cell in vivo (e.g., administered to an individual) using any convenient method (e.g., local or systemic, injection, local or system injection, oral, parenteral, subcutaneous, intravenous, intracranial, intraspinal, intraocular, into spinal fluid, and the like). In some cases, introduction can include nucleofection, electroporation, and the like. In some cases, introduction does not include nucleofection or electroporation.

### Kits

[0232] In some cases, a subject kit and/or subject composition includes a first CRISPR/Cas guide RNA (e.g., that hybridizes to a first target sequence within intron 44 of the dystrophin gene, e.g., as described in more detail above), and (b) a second CRISPR/Cas guide RNA (e.g., that hybridizes to a second target sequence within intron 55 of the dystrophin gene, e.g., as described in more detail above), where the first and second target sequences are separated from each other by greater than 330 kb.

[0233] In some cases, the guide sequence of the first CRISPR/Cas guide RNA (e.g., a Cas9 guide RNA) comprises the 17 nucleotide sequence set forth in any of SEQ ID NOs: 1155-1159. In some cases, the guide sequence of the first CRISPR/Cas guide RNA (e.g., a Cas9 guide RNA) comprises the 20 nucleotide sequence set forth in any of SEQ ID NOs: 1150-1154. In some cases, the guide sequence of the second CRISPR/Cas guide RNA (e.g., a Cas9 guide RNA) comprises the 17 nucleotide sequence set forth in any of SEQ ID NOs: 1175-1179. In some cases, the guide sequence of the first CRISPR/Cas guide RNA (e.g., a Cas9 guide RNA) comprises a nucleotide sequence set forth in any of SEQ ID NOs: 1223-1269. In some cases, the guide sequence of the second CRISPR/Cas guide RNA (e.g., a Cas9 guide RNA) comprises the 20 nucleotide sequence set forth in any of SEQ ID NOs: 1170-1174. In some cases, the guide sequence of the second CRISPR/Cas guide RNA (e.g., a Cas9 guide RNA) comprises a nucleotide sequence set forth in any of SEQ ID NOs: 1318-1365.

[0234] In some cases, the guide sequence of the first CRISPR/Cas guide RNA (e.g., a Cas9 guide RNA) comprises the 17 nucleotide sequence set forth in any of SEQ ID NOs: 1155-1159, and the guide sequence of the second CRISPR/Cas guide RNA (e.g., a Cas9 guide RNA) comprises the 17 nucleotide sequence set forth in any of SEQ ID NOs: 1175-1179. In some cases, the guide sequence of the first CRISPR/Cas guide RNA (e.g., a Cas9 guide RNA) comprises the 20 nucleotide sequence set forth in any of SEQ ID NOs: 1150-1154, and the guide sequence of the second CRISPR/Cas guide RNA (e.g., a Cas9 guide RNA) comprises the 20 nucleotide sequence set forth in any of SEQ ID NOs: 1170-1174.

[0235] In some cases, the guide sequence of the first CRISPR/Cas guide RNA (e.g., a Cas9 guide RNA) comprises the 17 nucleotide sequence GAAAUUAAACUACACAC (SEQ ID NO: 1158), and the guide sequence of the second CRISPR/Cas guide RNA (e.g., a Cas9 guide RNA) comprises the 17 nucleotide sequence AUGAUGCUAUAAUACCA (SEQ ID NO: 1177). In some cases, the guide sequence of the first CRISPR/Cas guide RNA (e.g., a Cas9 guide RNA) comprises the 20 nucleotide sequence GUUGAAAUUAAACUACACAC (SEQ ID NO: 1153) and the guide sequence of the second CRISPR/Cas guide RNA (e.g., a Cas9 guide RNA) comprises the 20 nucleotide sequence UGUAUGAUGCUAUAAUACCA (SEQ ID NO: 1172).

[0236] In some cases, the guide sequence of the first CRISPR/Cas guide RNA (e.g., a Cas9 guide RNA) has 100% complementarity over 20 contiguous nucleotides with a target sequence corresponding to intron 44 of the human dystrophin gene (e.g., a target sequence within intron 44 of the human dystrophin gene, a target sequence within a mouse dystrophin gene, etc.), and the guide sequence of the second CRISPR/Cas guide RNA (e.g., a Cas9 guide RNA) has 100% complementarity over 20 contiguous nucleotides with a target sequence corresponding to intron 55 of the human dystrophin gene (e.g., a target sequence within intron 55 of the human dystrophin gene, a target sequence within a mouse dystrophin gene, etc.). In some such cases, the target sequence corresponding to intron 44 and the target sequence corresponding to intron 55 are separated from each other by greater than 330 kilobases (kb). In some cases, the target sequence corresponding to intron 44 and the target sequence corresponding to intron 55 are separated from each other by 400 kilobases (kb) or more (e.g., 450 kb or more, 500 kb or more, 550 kb or more, 600 kb or more, 650 kb or more, 700 kb or more, etc.). In some cases, the target sequence within intron 44 and the target sequence within intron 55 are separated from each other by 700 kb or more.

[0237] In some cases, the guide sequence of the first CRISPR/Cas guide RNA (e.g., a Cas9 guide RNA) has 100% complementarity over 17 contiguous nucleotides with a target sequence corresponding to intron 44 of the human dystrophin gene, and the guide sequence of the second CRISPR/Cas guide RNA (e.g., a Cas9 guide RNA) has 100% complementarity over 17 contiguous nucleotides with a target sequence corresponding to intron 55 of the human dystrophin gene. In some such cases, the target sequence corresponding to intron 44 and the target sequence corresponding to intron 55 are separated from each other by greater than 330 kilobases (kb). In some cases, the target sequence corresponding to intron 44 and the target sequence corresponding to intron 55 are separated from each other by 400 kilobases (kb) or more (e.g., 450 kb or more, 500 kb or more, 550 kb or more, 600 kb or more, 650 kb or more, 700 kb or more, etc.). In some cases, the target sequence within intron 44 and the target sequence within intron 55 are separated from each other by 700 kb or more.

[0238] In some cases, a subject kit can further include a class 2 CRISPR/Cas endonuclease (e.g., a Cas9 protein), or a nucleic acid encoding the endonuclease.

[0239] Components (a) and (b) of a subject kit can be in the same or separate containers.

[0240] A composition and/or kit can further include one or more additional reagents, e.g., selected from: a dilution buffer; a reconstitution solution; a wash buffer; a control reagent; a control expression vector or RNA polynucleotide; a reagent for in vitro production of a class 2 CRISPR/Cas endonuclease from DNA or RNA, a reagent for in vitro production of a CRISPR/Cas guide RNA from DNA, and the like.

[0241] In addition to above-mentioned components, a subject kit can further include instructions for using the components of the kit to practice the subject methods. The instructions for practicing the subject methods are generally recorded on a suitable recording medium. For example, the instructions may be printed on a substrate, such as paper or plastic, etc. As such, the instructions may be present in the kits as a package insert, in the labeling of the container of the kit or components thereof (i.e., associated with the packaging or subpackaging) etc. In other embodiments, the instructions are present as an electronic storage data file present on a suitable computer readable storage medium, e.g. CD-ROM, diskette, flash drive, etc. In yet other embodiments, the actual instructions are not present in the kit, but means for obtaining the instructions from a remote source, e.g. via the internet, are provided. An example of this embodiment is a kit that includes a web address where the instructions can be viewed and/or from which the instructions can be downloaded. As with the instructions, this means for obtaining the instructions is recorded on a suitable substrate.

### EXAMPLES

[0242] The following examples are put forth so as to provide those of ordinary skill in the art with a complete disclosure and description of how to make and use the present invention, and are not intended to limit the scope of what the inventors regard as their invention nor are they intended to represent that the experiments below are all or the only experiments performed. Efforts have been made to ensure accuracy with respect to numbers used (e.g. amounts, temperature, etc.) but some experimental errors and deviations should be accounted for. Unless indicated otherwise, parts are parts by weight, molecular weight is weight average molecular weight, temperature is in degrees Celsius, and pressure is at or near atmospheric. Standard abbreviations may be used, e.g., bp, base pair(s); kb, kilobase(s); pl, picoliter(s); s or see, second(s); min, minute(s); h or hr, hour(s); aa, amino acid(s); kb, kilobase(s); bp, base pair(s); nt, nucleotide(s); i.m., intramuscular(ly); i.p., intraperitoneal(ly); s.c., subcutaneous(ly); and the like.

### Materials and Methods

[0243] Cloning of gRNAs

[0244] Five guide RNAs were designed to target DMD introns 44 and 55 using the Zhang lab CRISPR design tool (“crispr.mit“followed by”.edu”) and cloned into the spCas9 plasmids pX330 or pX459 from Feng Zhang (Addgene #42230, #48139 respectively) adapted from Ran et al. (Nature Protocols, 2013. 8:2281-2308). In brief, oligos complementary to each other containing the gRNA sequence and BbsI restriction enzyme site were obtained from Integrated DNA Technologies and annealed. The annealed oligos and plasmid were simultaneously digested with BbsI (New England Biotechnologies) and ligated with T4 DNA ligase (Life Technologies).

TABLE 3
gRNA sequences and oligos used for cloning

| | Non-complementary | | |
|---|---|---|---|
| Name | strand of target sequence | Sense oligo | Antisense oligo |
| 44C1 | GTGGTGTCCTTTGAAT | CACCGTGGTGTCCTTT | AAACGCATATTCAAA |
| | ATGCAGG | GAATATGC | GGACACCAC |
| | (SEQ ID NO: 1368) | (SEQ ID NO: 1378) | (SEQ ID NO: 1388) |
| 44C2 | AGATTGTCCAGGATA | CACCGAGATTGTCCA | AAACAATTATATCCT |
| | TAATTTGG | GGATATAATT | GGACAATCTC |
| | (SEQ ID NO: 1369) | (SEQ ID NO: 1379) | (SEQ ID NO: 1389) |
| 44C3 | TTAGCAACCAAATTA | CACCGTTAGCAACCA | AAACGGATATAATTT |
| | TATCCTGG | AATTATATCC | GGTTGCTAAC |
| | (SEQ ID NO: 1370) | (SEQ ID NO: 1380) | (SEQ ID NO: 1390) |
| 44C4 | GTTGAAATTAAACTA | CACCGTTGAAATTAA | AAACGTGTGTAGTTT |
| | CACACTGG | ACTACACAC | AATTTCAAC |
| | (SEQ ID NO: 1371) | (SEQ ID NO: 1381) | (SEQ ID NO: 1391) |
| 44C5 | ATCTTTACCTGCATAT | CACCGATCTTTACCTG | AAACTTGAATATGCA |
| | TCAAAGG | CATATTCAA | GGTAAAGATC |
| | (SEQ ID NO: 1372) | (SEQ ID NO: 1382) | (SEQ ID NO: 1392) |
| 55C1 | TACACATTTTTAGGCT | CACCGTACACATTTTT | AAACGTCAAGCCTAA |
| | TGACAGG | AGGCTTGAC | AAATGTGTAC |
| | (SEQ ID NO: 1373) | (SEQ ID NO: 1383) | (SEQ ID NO: 1393) |
| 55C2 | CATTCCTGGGAGTCT | CACCGCATTCCTGGG | AAACATGACAGACTC |
| | GTCATGGG | AGTCTGTCAT | CCAGGAATGC |
| | (SEQ ID NO: 1374) | (SEQ ID NO: 1384) | (SEQ ID NO: 1394) |
| 55C3 | TGTATGATGCTATAAT | CACCGTGTATGATGC | AAACTGGTATTATAG |
| | ACCAAGG | TATAATACCA | CATCATACAC |
| | (SEQ ID NO: 1375) | (SEQ ID NO: 1385) | (SEQ ID NO: 1395) |
| 55C4 | GTGGAAAGTACATAG | CACCGTGGAAAGTAC | AAACAGGTCCTATGT |
| | GACCTTGG | ATAGGACCT | ACTTTCCAC |
| | (SEQ ID NO: 1376) | (SEQ ID NO: 1386) | (SEQ ID NO: 1396) |
| 55C5 | TCTTATCATAACTCTT | CACCGTCTTATCATAA | AAACTGGTAAGAGTT |
| | ACCAAGG | CTCTTACCA | ATGATAAGAC |
| | (SEQ ID NO: 1377) | (SEQ ID NO: 1387) | (SEQ ID NO: 1397) |

Bold and underlined text is NGG PAM sequence.

### Mice

[0245] All animal work was conducted under protocols approved by the UCLA Animal Research Committee in the Office of Animal Research Oversight. Mice used for engraftment experiments were generated by crossing mdx scid (Jackson Laboratory) with NOD scid IL2Rgamma (Jackson Laboratory) mice. Briefly, female B10ScSn.Cg-Prkdc^{scid}Dmd^{mdx}/J were crossed with male NOD.Cg-Prkdc^{scid}Il2rg^{tm1Wj1}/SzJ. Then the F1 females from that cross were crossed with male mdx-scid. The F3 males were screened for dystrophin and gamma mutations and the mutants were then backcrossed again with mdx-scid females. F4 females were crossed with F3 mutant males which generated homozygous NSG-mdx mice. Genotyping was performed through TransnetYX.

### Cell Culture

[0246] Human embryonic kidney (HEK) 293FT cells (Life Technologies) were grown in standard conditions with growth medium consisting of DMEM (high glucose) with 10% fetal bovine serum (FBS, Life Technologies), 0.1 mM non-essential amino acids (NEAA, Life Technologies), 6 mM L-glutamine (Life Technologies).

[0247] Human skeletal muscle myoblasts (HSMM, Lonza) were maintained according to the manufacturer's instructions with SkGM-2 medium (Lonza). For terminal differentiation, they were cultured on Matrigel (Corning) until at least 80% confluent and then switched to N2 differentiation medium (DMEM/F12 with 1% N2 supplement (Life Technologies) and 1% insulin-transferrin-selenium (ITS, Life Technologies)) for 7 days.

[0248] Human induced pluripotent stem cells (hiPSCs) were reprogrammed from skin fibroblasts with the STEMCCA cassette as previously described (Karumbayaram et al., Stem Cells Transl. Med., 2012. 1:36-43). They were grown on hESC qualified Matrigel (Corning), fed daily with mTeSR1 medium (Stem Cell Technologies) and passaged with 0.5 mM EDTA every 5-7 days. Karyotype and FISH analyses were performed by Cell Line Genetics.

### Teratoma Injections

[0249] To prepare hiPSCs for injection, 1-2 confluent wells were collected using 1 mg/ml of collagenase type IV or 0.5 mM EDTA. Colonies were dissociated using a 5 ml pipette and centrifuged at 1000 rpm. Cell pellets were resuspended in 40 μl of Hank's Balanced Salt Solution (HBSS) and injected into the testes of 6-8 week-old SCID BEIGE mice (Charles River) as described previously (Alva et al., Stem Cells, 2011. 29:1952-1962). After 4-8 weeks, teratomas were isolated and fixed in 4% paraformaldehyde (PFA) for 24 hours, then 70% ethanol. Fixed teratomas were embedded and processed by the Tissue Procurement Core Laboratory, Department of Pathology and Laboratory Medicine, David Geffen School of Medicine at UCLA. If teratomas were large, four to six quadrants were isolated and fixed in PFA as described above. Tumors were stained with hematoxylin and eosin and imaged with an Olympus BX51 microscope.

Transfection and Nucleofection of gRNAs

[0250] 3×10⁵ HEK293FT cells were seeded per 12 well and transfected in duplicate the following day with 1 μg DNA using 3 μl TransIT293 (Mirus Bio) according to the manufacturer's instructions.

[0251] Amaxa 4D (Lonza) nucleofection of hiPSCs was performed according to the manufacturer's instructions. In brief, hiPSCs were pre-treated with 10 μM ROCK inhibitor Y-27632 (ROCKi, Tocris Bioscience) for 1 hr and trypsinized into a single cell suspension with TryplE (Life Technologies). 8×10⁵ hiPSCs were nucleofected per 100 μl cuvette using solution P3, 2 μg or 3.5 μg total DNA, and program CA-137 (Lonza). pMAX GFP (Lonza) was used as a transfection control. After nucleofection, cells were immediately plated in mTeSR1 with ROCKi. For selection, 0.35 μg/ml of puromycin in mTeSR1 was added to the cells for 24 hrs the day after nucleofection.

Generation of Clonal hiPSC Lines

[0252] For generation of clonal lines, the day following nucleofection of gRNAs 44C4 and 55C3 (in pX459) cells were selected with 0.35 μg/ml of puromycin in mTeSR1 for one day. The cells were expanded for 7-9 days in mTeSR1 and then either single cell sorted in ROCKi using a FACSAria sorter (BD) into individual 96 wells or plated at low densities of 3×10⁵-5×10⁵ cells per 10 cm dish in mTeSR1 plus ROCKi. After 2 weeks, individual colonies were scrapped into a corresponding 48 well and a subset of the colony was manually dissected and screened using the deletion genotyping PCR below.

### Deletion Genotyping PCR

[0253] For determining if the exon 45-55 deletion occurred, either individual PCR reactions or a multiplex PCR containing both sets of primers was performed with AccuPrime Taq High Fidelity (Life Technologies). One primer pair flanked the deleted region (del) and one pair was within the deleted region (undel). PCR products were run on a 1.2% agarose gel and visualized with ethidium bromide staining.

TABLE 4
Primer sequences for PCR (genotyping)

| Primer name, purpose | Sequence |
|---|---|
| 44_F, | CTGGACGGAGCTGGTTTATCT |
| forward primer for | (SEQ ID NO: 1398) |
| del genotyping | |
| 55surv2_R, | CCCTTTTCTTGGCGTATTGCC |
| reverse primer for | (SEQ ID NO: 1399) |
| del genotyping | |
| 55undel1_F, | GCCTGGGTCTCTGCTATCAA |
| forward primer | (SEQ ID NO: 1400) |
| for undel genotyping | |
| 55undel1_R, | GCCACTTTGTACTCCGCACT |
| reverse primer | (SEQ ID NO: 1401) |
| for undel genotyping | |

[0254] Analysis of the rejoining sequence after an exon 45-55 deletion was performed by blunt cloning the deleted PCR products into the Zero Blunt TOPO backbone (Life Technologies), according to the manufacturer's instructions, and sequencing of the insert by Laragen Inc.

Differentiation of hiPSC-Derived Skeletal Muscle

[0255] hiPSCs were differentiated into skeletal muscle cells by overexpression of MyoD, adapted from Abujarour et al. (Stem Cells Trans. Med., 2014. 3:149-160). Cells were trypsinized with TryplE and plated as single cells on Matrigel in SMC4 (basal medium: DMEM/F-12 with 20% knock-out serum replacement (KOSR, Life Technologies), 1% NEAA, 1% Glutamax (Life Technologies), 100 μM beta-mercaptoethanol, 10 ng/mL basic fibroblast growth factor (bFGF, Life Technologies); SMC4: basal media with daily addition of 5 μM ROCKi, 0.4 μM PD0325901 (Sigma-Aldrich), 2 μM SB431542 (Tocris Bioscience), 1 μM CHIR99021 (Tocris Bioscience)) at 3.5×10⁵ cells/6 well. When they reached approximately 60-80% confluent they were infected with 0.06 μg/mL of a tamoxifen inducible MyoD-ERT lentivirus (adapted from Kimura et al., Hum. Mol. Genet., 2008. 17:2507-2517) with 4 μg/mL protamine sulfate per well and spun inoculated at 1250 rpm for 90 mins at 32° C. After a day of recovery they were selected with 2 μg/ml puromycin in SMC4 for 2 days. The cells were then split and plated on Matrigel in basal medium without bFGF plus 10 μM ROCKi at approximately 1×10⁵ cells/cm² and induced in DMEM with 15% FBS and 5 μM tamoxifen for 4 days. Following induction, the cells were differentiated in low glucose DMEM with 5% horse serum and 1 μM tamoxifen for 5-7 days. Medium was changed daily.

[0256] An alternative protocol for MyoD overexpression was used for engraftment. Cells were single cell plated at 2.5×10⁴ cells/cm² on Matrigel in mTeSR1 with ROCKi. Beginning the following day, they were treated with 3 μM CHIR99021 in DMEM/F12 with 1% ITS for 2 days. The cells were split to approximately 6×10⁴ cells/cm² in DMEM with 10% FBS and 1% NEAA and infected with the MyoD-ERT lentivirus as above. After a day of recovery, the cells were selected with 1 μg/ml puromycin for 4 days followed by induction in IMDM containing 15% FBS, 10% horse serum (HS), 1% chick embryo extract, 50 μg/ml ascorbic acid, 4.5 mM monothioglycerol, 5 ng/ml bFGF with 5 μM tamoxifen for 2 days and used for engraftment as described below.

[0257] A directed differentiation protocol for hiPSCs adapted from Shelton et al. (Stem Cell Reports, 2014. 3:516-529) was also used to obtain SMPCs. Cells were single cell plated in mTeSR1 with 10 μM ROCKi at 3.75×10⁵ cells/6 well. The following day, 10 μM of CHIR99021 was added in Essential 6 medium (E6, Stem Cell Technologies) for 2 days and the cells were allowed to differentiate until day 12 in E6. StemPro (Gibco) containing 20 ng/ml bFGF was added between days 12 to 20. E6 was then added until day 35 when the cells were switched to N2 medium in order to terminally differentiate. At day 50, cells were fluorescently activated cell sorted to remove neural crest cells with HNK1⁻ (1:300, Sigma-Aldrich) and enrich for SMPCs with BV650-NCAM⁺ (1:25, BD Bioscience). The SMPCs were cultured in expansion media (20% FBS, 5% HS, 1% chick embryo extract, 0.5% penicillin/streptomycin) until confluent when they were changed to N2 medium for 7 days to induce terminal differentiation.

Differentiation of hiPSC-Derived Cardiomyocytes

[0258] Confluent hiPSCs were enzymatically dissociated to form aggregates and differentiated into the cardiomyocyte lineage (e.g., see Arshi et al. 2013; Minami et al. 2012). The medium was changed every 2 days up to day 15, and every 5 days up to day 30. At day 30, cardiomyocytes were harvested for analysis or subjected to the hypoosmotic stress assay.

### Surveyor Assay

[0259] For testing the activity of different gRNAs, genomic DNA (gDNA) was extracted on day 3 or 4 after transfection/nucleofection using the Quick gDNA mini prep kit (Zymo Research) or Quick Extract DNA Extraction Solution 1.0 (Epicenter) according to the manufacturer's instructions. PCR for use in Surveyor assay was performed with AccuPrime Taq High Fidelity with primers flanking the target region.

[0260] The Surveyor assay (Integrated DNA Technologies) was performed according to the manufacturer's instructions. In brief, approximately 300 ng of PCR product in 1× AccuPrime buffer up to 20 μl was denatured and reannealed by heating at 95° C. for 10 min and slowly step-wise cooling to 4° C. Then 2 μl MgCl₂, 1 μl Surveyor enhancer, and 1.2 μl Surveyor enzyme were added and incubated at 42° C. for 1 hr. The G/C plasmids provided in the Surveyor kit were used as a positive control for every gel. The products were run on a 6% or 4-20% TBE polyacrylamide gel (Bio-Rad) and visualized with ethidium bromide staining. The percent of cutting was determined using ImageJ (Rasband, ImageJ, U. S. Natl. Institutes Heal., 1997).

TABLE 5
Primer sequences for PCR (Surveyor assay)

| Primer name, purpose | Sequence |
|---|---|
| 44surv_F, | GAGAGTTTGCCTGGACGGA |
| forward primer for | (SEQ ID NO: 1402) |
| intron 44 surveyor | |
| 44surv_R, | CCTCTCTATACAAATGCCAACGC |
| reverse primer for | (SEQ ID NO: 1403) |
| intron 44 surveyor | |
| 55surv2_F, | TCCAGGCCTCCTCTCTTTGA |
| forward primer for | (SEQ ID NO: 1404) |
| intron 55 surveyor | |
| 55surv2_R, | CCCTTTTCTTGGCGTATTGCC |
| reverse primer for | (SEQ ID NO: 1405) |
| intron 55 surveyor | |

### Hypoosmotic Stress CK Release Assay

[0261] Terminally differentiated skeletal muscle cells and cardiomyocytes plated in duplicate were stressed by incubation in hypoosmolar solutions ranging from 66-240 mosmol. Hypoosmolar salt solutions ranging from 66-240 mosmol were made by adding varying amounts of sucrose (˜25-175 mM) to a basic salt solution consisting of 5 mM HEPES, 5 mM KCl, 1 mM MgCl₂, 5 mM NaCl, 1.2 mM CaCl₂, 1 mM glucose. Osmolarities were measured with a Wescor Vapro 5520 osmometer.

[0262] Differentiated MyoD OE skeletal myotubes and cardiomyocytes were plated in a 384 or 96 well plate in duplicate per condition tested. 100 μl (or 30 μl for 384 well plates) of the hypoosmolar solution was added to each well and the cells were incubated at 37° C. for 20 mins. The solution (supernatant) was then removed and stored at −80° C. until CK analysis. The cells were trypsinized and lysed in 100 μl dl water by repeated freeze/thawing three times. The lysate was stored at −80° C. until CK analysis. CK was measured in triplicate with 2 μl or 8 μl of undiluted sample using the Creatine Kinase-SL kit (Sekisui Diagnostics) according to the manufacturer's instructions. Any negative readings were forced to be 0 and outliers were discounted from the analysis. The percent of CK release into the supernatant was determined and the standard error was propagated throughout all calculations.

RNA Extraction, cDNA, and PCR

[0263] RNA was extracted from differentiated cardiomyocytes using the RNeasy Micro Kit (Qiagen) according to the manufacturer's instructions. cDNA synthesis was performed on 50-250 ng of RNA using the iScript Reverse Transfection Supermix for RT-qPCR (Bio-Rad). Two PCR reactions were done on all samples, one with primers internal to the deletion and one with primers flanking the deletion for 40 cycles using AccuPrime Taq. PCR products were cloned using the TOPO-TA cloning kit (Life Technologies) according to the manufacturer's instructions and sequenced at the UCLA GenoSeq Core.

TABLE 6
Primer sequences for PCR (RNA extraction)

| Primer name, purpose | Sequence |
|---|---|
| DMD_E43-44_F, | CCGACAAGGGCGATTTGACA |
| forward primer for | (SEQ ID NO: 1406) |
| cDNA, deleted | |
| DMD_E57_R, | AAGTCGCCTCCAATAGGTGC |
| reverse primer for | (SEQ ID NO: 1407) |
| cDNA, deleted | |
| DMD_E52_F, | ACTCATTACCGCTGCCCAAA |
| forward primer for | (SEQ ID NO: 1408) |
| cDNA, undeleted | |
| DMD_E55_R, | TCTTCCAAAGCAGCCTCTCG |
| reverse primer for | (SEQ ID NO: 1409) |
| cDNA, undeleted | |

miRNA Extraction, cDNA, and ddPCR

[0264] miRNA was isolated from fused myotubes obtained by MyoD OE using a microRNA purification kit (Norgen Biotek Corp) according to the manufacturer's instructions. cDNA synthesis was performed on 5 μl of miRNA with TaqMan microRNA reverse transcription kit (Applied Biosystems) using a TaqMan MicroRNA Assay (Applied Biosystems) for hsa-miR-31 (assay ID 002279) and U6 snRNA (assay ID 001973) with specific RT primers. PCR reactions were prepared in a premix of 22 μl with 1.46 μl of cDNA (either diluted 1:30 for U6 or undiluted for miR31) in ddPCR supermix for probes (without UTP) (Bio-Rad) and 1.1 μl 20× TaqMan assay probes for each sample in duplicate. 20 μl of the PCR reaction premix was used to generate droplets according to the manufacturer's protocol. Briefly, PCR premix was added to a droplet generator cartridge with 70 μl of oil and droplets were generated with the QX200 droplet generator (Bio-Rad). 40 μl of this reaction mix was transferred to a PCR plate and run on at T100 thermal cycler (Bio-Rad) at 95° C. for 10 mins, 40 cycles of 95° C. 15 sec, 60° C. for 60 sec, followed by 98° C. for 10 mins. A no template control was included for each PCR reaction. FAM fluorescence was evaluated using the QX200 droplet reader and QuantaSoft software (Bio-Rad). The percent of positive droplets for miR31 was normalized to the percent of positive droplets for U6. Standard deviation error was propagated through all calculations. All lines were normalized to CDMD 1002 wild type.

Engraftment into Immunodeficient Mice

[0265] NOD scid IL2Rgamma (NSG) immunodeficient mice (Jackson Laboratory) were crossed to mdx scid mice (Jackson Laboratory) to generate NSG-mdx mice, see above. 24 hrs prior to engraftment, the right tibialis anterior (TA) of 5-7 week-old NSG-mdx mice was pretreated with 50 μl of 10 μM cardiotoxin (Sigma-Aldrich). For MyoD OE cells, 100 μL of 5 mg/ml tamoxifen (Sigma-Aldrich) was also IP injected for 5 days with tamoxifen pretreatment starting the day before engraftment (Muir et al., Mol. Ther. Methods Clin. Dev., 2014. 1:14025). 1×10⁶ cells obtained from MyoD OE after induction were pelleted and resuspended in 5 μL HBSS and injected intramuscularly into the TA. Tissue was harvested after 30 days and analyzed as described below. Engraftment was considered successful when human cells that were both lamin A/C and spectrin positive were identified. Successful engraftment was seen in the following: CDMD 1002 N=4/4 engrafted successfully; CDMD 1003 N=1/1 engrafted successfully; and CDMD 1003-49 N=1/2 engrafted successfully.

### Immunostaining

[0266] hiPSCs were fixed in 4% PFA for 20 mins, permeabilized with 0.3% Triton X for 10 mins and blocked in 10% goat serum for 1 hr. Primary antibodies to SOX2 (1:200, Cell Signaling) and NANOG (1:800, Cell Signaling) were added in 1% goat serum and 0.1% Triton X overnight at 4° C. followed by secondary antibodies for 2 hrs the following day.

[0267] Differentiated skeletal myotubes obtained from MyoD overexpression were fixed in 80% acetone for 7 mins at −20° C., blocked with 10% goat serum for 1 hr and stained with dystrophin (1:300, Abcam) and myosin heavy chain (1.9 μg/ml, MF20, DHSB) as above. Differentiated cardiomyocytes and skeletal myotubes obtained from the 50 day directed differentiation protocol were fixed in 4% PFA for 20 mins, permeabilized with 0.3% Triton X for 10 mins, blocked in 10% goat serum for 1 hr and stained with dystrophin (1:5, MANDYS106, MDA Monoclonal Antibody Resource, (Man and Morris, Am. J. Hum. Genet., 1993. 52:1057-1066)) or beta-dystroglycan (1:100, Leica Biosystems) and myosin heavy chain (1.9 μg/ml, MF20, DHSB). Images were obtained with the Axio Observer Z1 microscope (Zeiss).

[0268] Harvested TA muscles were flash frozen in isopentane. 10 μm cryosections were obtained at intervals throughout the entire muscle and stored at −20° C. For staining, they were blocked in 0.25% gelatin, 0.1% Tween, 3% bovine serum albumin for 1 hr. The M.O.M. blocking kit (Vector Laboratories) was applied according to the manufacturer's instructions. Primary antibodies consisting of human lamin A/C (1:125, Vector Laboratories), human spectrin (1:75, Leica Biosystems), human dystrophin (1:5, MANDYS106), laminin (1:200, Sigma-Aldrich), dystrophin (1:75, Abcam), and beta-dystroglycan (1:50, Leica Biosystems) were applied overnight at 4° C. The following day secondary antibodies were incubated for 1 hr and the slides were mounted with VECTASHIELD containing DAPI (Vector Laboratories) and imaged on the Axio Observer Z1 microscope.

### Western Blot Analysis

[0269] Terminally differentiated skeletal muscle cells and cardiomyocytes were trypsinized, pelleted, and flash frozen in liquid nitrogen. Cell pellets were stored in liquid nitrogen until lysis. For Western blotting, samples were prepared as described in Woo et al. (Exp. Mol. Med., 2010. 42:614-627) with slight modifications. In brief, cells were solubilized in 500 μl of lysis buffer (10 mM Tris-HCl (pH 7.4), 1% Triton X-100, 10% glycerol, 150 mM NaCl, 5 mM EDTA, and HALT protease and phosphatase inhibitor cocktail (ThermoScientific)) per a 10 cm culture dish, followed by incubation at 4° C. for 30 min with gentle rotation. Then lysates were mixed with 100 μl of 6×RSB and passed several times through a syringe needle to reduce viscosity. Afterwards samples were boiled for 3 min, cooled on ice, passed through a syringe needle again and centrifuged for 5 min at 13,000 g. Clarified lysates were transferred to new tubes, aliquoted and stored at −80° C. till use. To evaluate dystrophin and MyHC content, cell lysates were subjected to 6% polyacrylamide gel electrophoresis (PAGE) for 3 hours at constant current (10 mA per gel); followed by blotting to nitrocellulose membrane at constant voltage (100 V) for 2.5 hours on ice. 0.1% sodium dodecyl sulfate (SDS) and 10 mM dithiothreitol (DTT) was added to the transfer buffer to facilitate blotting of high molecular proteins. Immunoblot assay was carried out with mouse anti-MyHC (1:1,000; MF20, DHSB), and mouse anti-dystrophin (1:500; Mandys8, Sigma-Aldrich) antibodies. Secondary antibodies used were anti-mouse peroxidase conjugates from Sigma-Aldrich (1:10,000). Blots were developed using ChemiGlow West chemiluminescent detection kit (ProteinSimple). Signals were registered by the FluorChem FC2 digital imaging system (Alpha Innotech).

[0270] For β-dystroglycan, a 7.5% PAGE gel was run for 1.5 hrs at 100 V. Transfer was performed in Tris/Glycine with 20% MetOH for 1 hr 15 min at 100 V. Immunoblotting was performed with mouse anti-β-dystroglycan (1:200, MANDAG2(7D11), DHSB) and MyHC antibody as above.

### Off Target Analysis

[0271] The top 10 unique off target sites for each gRNA used (44C4 and 55C3) were determined with COSMID (Cradick et al., Mol. Ther. Nucleic Acids, 2014. 3:e214) using the following criteria: NRG PAM, 3 mismatches with no indels, and 2 mismatches with 1-base deletions or insertions. Access Array primers corresponding to the potential off target locations were designed, manufactured and validated by Fluidigm. gDNA extracted from the parental and deleted clonal lines was run on an Access Array (Fluidigm) and sequenced with MiSeq in the UCLA GenoSeq Core. Reads were trimmed with Trimmomatic and aligned to the genome using BWA. A base quality score recalibration and indel realignment was performed using GATK and SNP calling was done using two separate programs, GATK and LoFreq on the 20 bp gRNA homologous region. A true induced mutation was considered possible if the fraction of reads with a given variant was substantially higher than error rate of base calling.

TABLE 7
Top potential off target sites as determined by COSMID

| Name | Genomic location (hg19) |
|---|---|
| 44C4_OT1 | Chr11: 87808333-87808355 |
| 44C4_OT2 | Chr3: 160301263-160301285 |
| 44C4_OT3 | Chr4: 168882168-168882190 |
| 44C4_OT4 | Chr11: 12974242-12974264 |
| 44C4_OT5 | Chr11: 28401278-28401300 |
| 44C4_OT6 | Chr11: 96681660-96681682 |
| 44C4_OT7 | ChrX: 44266358-44266380 |
| 44C4_OT8 | Chr6: 75606852-75606874 |
| 44C4_OT9 | Chr1: 91110525-91110547 |
| 44C4_OT10 | Chr3: 145258890-145258912 |
| 55C3_OT1 | Chr18: 31956684-31956706 |
| 55C3_OT2 | Chr2: 28730131-28730153 |
| 55C3_OT3 | Chr10: 4923833-4923855 |
| 55C3_OT4 | Chr13: 68797419-68797440 |
| 55C3_OT5 | Chr13: 70672235-70672256 |
| 55C3_OT6 | Chr4: 101494350-101494372 |
| 55C3_OT7 | Chr3: 81046407-81046428 |
| 55C3_OT8 | Chr11: 45856883-45856904 |
| 55C3_OT9 | Chr1: 171162826-171162847 |
| 55C3_OT10 | Chr3: 108717117-108717140 |

### Statistical Analysis

[0272] Statistical analyses were performed using a two-tailed t-test on two groups of data. First an F-test was used to determine if the variances were equal or unequal, than the corresponding t-test was used. Significance was determined by a p-value less than 0.05.

### Example 1: A Single CRISPR-Cas9 Deletion Strategy that Targets the Majority of DMD Patients Restores Dystrophin Function in hiPSC-Derived Muscle Cells

[0273] Mutations in DMD disrupt the reading frame, prevent dystrophin translation, and cause Duchenne muscular dystrophy (DMD). A CRISPR/Cas9 platform applicable to 60% of DMD patient mutations is described. The platform was applied to DMD-derived hiPSCs where successful deletion and non-homologous end joining of up to 725 kb reframed the DMD gene. Use of hiPSCs allowed for evaluation of dystrophin in disease relevant cell types. Cardiomyocytes and skeletal muscle myotubes derived from reframed hiPSC clonal lines had restored dystrophin protein. The internally deleted dystrophin was functional as demonstrated by improved membrane integrity and restoration of the dystrophin glycoprotein complex in vitro and in vivo. Furthermore, miR31 was reduced upon refraining, similar to observations in Becker muscular dystrophy.

DMD hiPSC Lines are Pluripotent and Genetically Stable

[0274] Several xenobiotic-free hiPSC lines derived from wild type and DMD patient fibroblasts were developed using current good manufacturing practice protocols. Each DMD hiPSC line harbors a unique frame-shifting DMD mutation within the exon 45-55 hotspot region. All hiPSC lines (Center for Duchenne Muscular Dystrophy (CDMD) 1003, 1006 and 1008) express pluripotency markers (NANOG and SOX2) and are karyotypically normal (FIG. 1A and FIG. 1B). CDMD hiPSCs maintain pluripotency, as they form teratomas in vivo that represent all three germ layers (FIG. 1C), and each harbor unique mutations (FIG. 1D).

[0275] FIG. 1: CDMD hiPSCs are pluripotent and genetically stable. FIG. 1A. CDMD hiPSCs were generated from DMD fibroblasts. Brightfield images depict fibroblasts before and after reprogramming to hiPSCs. Immunocytochemical staining reveals that cells express pluripotency markers NANOG (green) and SOX2 (red). Scale bar 100 μm. FIG. 1B. Karyotyping of all lines is shown. FIG. 1C. CDMD hiPSCs were injected into mice to test teratoma formation in vivo. Representative hematoxylin and eosin stainings of the three germ layers (endoderm, mesoderm, and ectoderm) are shown. FIG. 1D. Patient mutations for each CDMD hiPSC line are shown. In addition, the number of exons and the approximate distance necessary for successful NHEJ is indicated, based on comparative genomic hybridization data for the patient's underlying mutation size.

### CRISPR/Cas9-Mediated Deletion and NHEJ of Up to 725 kb in the DMD Gene

[0276] In order to delete exons 45-55 of DMD, gRNAs were designed to target introns 44 and 55. gRNA sites were chosen to only retain ˜500 bp of the intron next to each of the flanking exons (44 and 56). The rationale for this design was to develop gRNAs applicable to as many patient mutations as possible and to ensure a small functional chimeric intron is generated. During NHEJ, the 3′ end of intron 44 and the 5′ end of intron 55 join to create a ˜1 kb chimeric intron (FIG. 2A). Introns generated in this manner are expected to be functional and splice correctly to create an in-frame transcript, with exon 44 joined with exon 56.

[0277] FIG. 2: Generation of stable, pluripotent CDMD hiPSC lines with an exon 45-55 deletion. FIG. 2A. Shown is a cartoon (not to scale) of the region of DMD targeted for CRISPR/Cas9-mediated deletion using gRNAs specific to introns 44 and 55 (lightning bolts). Successful NHEJ deletes exons 45-55 and restores the reading frame for mutations within this region. Different deletion sizes are required depending on the patient's underlying mutation (black arrow heads). FIG. 2B. PCR genotyping of 117 and 109 single cell clones from parental lines CDMD 1006 and 1003, respectively, was carried out on cells nucleofected with gRNAs 44C4 and 55C3. One clone from CDMD 1006 (CDMD 1006-1) and three from CDMD 1003 (CDMD 1003-49, 1003-57, 1003-81) were identified as stably deleted. Deletion PCR genotyping results for 6 hiPSC clonal lines is shown. One pair of primers (red arrows in A) was located internal to the deletion and only produced a 1201 bp band in the undeleted clones CDMD 1003-13 and 1003-51. Another primer set (purple arrows in A) flanked the deletion region and produced a 788 bp band only when the deletion and NHEJ occurred successfully, as in the refrained clones CDMD 1006-1, 1003-49, 1003-57, 1003-81. FIG. 2C. Each clonal line maintained normal morphology (brightfield) and expressed NANOG (green) and SOX2 (red) by immunocytochemistry. Scale bar 100 μm. Shown to the right is the sequence of the gDNA at the rejoining site between introns 44 (144) and 55 (155). Sequencing revealed a 16 bp deletion in CDMD 1006-1, a 2 bp insertion in CDMD 1003-49, and 1 bp insertions in CDMD 1003-57 and CDMD 1003-81.

[0278] Since hiPSCs are challenging to genetically manipulate, human embryonic kidney (HEK) 293FT cells were used to screen five gRNAs at each intronic region. All gRNAs demonstrated individual cutting activity on Surveyor assay up to 34% (FIG. 3A and FIG. 3B). Using multiplex PCR, gRNAs transfected in pairs were shown to effectively delete the entire 708 kb region encompassing exons 45-55 (FIG. 3C and FIG. 3D).

[0279] FIG. 3: gRNA activity and exon 45-55 deletion in 293FT cells. FIG. 3A-3B. Five gRNAs targeted to introns 44 and 55 respectively, show activity on Surveyor assay in HEK293FT cells. Red arrows denote expected cleavage product bands (TABLE 8). Note in A, the bands highlighted by the blue arrowheads are likely non-specific PCR products and were discounted from the analysis. The estimated percent of cutting is shown below each lane. The positive control (pos) is provided with the Surveyor kit. A 100 bp ladder was used. FIG. 3C. Cartoon highlighting the region of DNA targeted by CRISPR pairs and indicating primers used for PCR. CRISPR gRNA sites are shown by lightning bolts. When pairs of gRNAs targeted to introns 44 and 55 are co-transfected, an exon 45-55 deletion (˜708 kb) results after NHEJ. This deletion is measured using multiplex PCR where the primer pair shown in red will amplify the undeleted product while the purple primer pair flanking the deleted region only gives a product when successful rejoining has occurred. FIG. 3D. Example of a multiplex PCR, using the primers indicated in FIG. 3C, in which effective deletion of exons 45-55 was achieved with all gRNA pairs tested in 293FT cells. A 100 bp ladder was used.

TABLE 8
Expected cleavage product sizes from Surveyor assay

| gRNA | Expected sizes (bp) |
|---|---|
| 44C1 | 423, 480 |
| 44C2 | 445, 458 |
| 44C3 | 449, 454 |
| 44C4 | 387, 516 |
| 44C5 | 419, 484 |
| 55C1 | 379, 490 |
| 55C2 | 364, 505 |
| 55C3 | 411, 458 |
| 55C4 | 357, 512 |
| 55C5 | 351, 518 |

[0280] In order to assess the feasibility of an exon 45-55 deletion across different patient mutations, gRNAs were applied to three DMD hiPSC lines. The lines (CDMD 1003, 1006, 1008) required ˜530 kb, 670 kb, or 725 kb for successful deletion and NHEJ of DMD respectively. The gRNAs used were shown to be active in all three lines and effectively deleted exons 45-55 (FIG. 4 and FIG. 5). Transient puromycin selection of cells nucleofected with the CRISPR plasmids improved the efficiency of deletion in CDMD 1003 and 1006 hiPSCs (FIG. 5D).

[0281] FIG. 4: gRNAs show cutting by Surveyor assay in CDMD hiPSCs. FIG. 4A. CDMD 1006 hiPSCs nucleofected with GFP serve as an untreated control and demonstrate ˜40% transfection efficiency. FIG. 4B-FIG. 4D. gRNAs demonstrate activity on Surveyor assay in CDMD 1003, 1006 and 1008 lines respectively. *3× the amount of 55C3 DNA was added during nucleofection. Red arrows denote expected cleavage product bands (TABLE 8). Note the band in FIG. 4B highlighted by the blue arrow head is likely a non-specific PCR product and was discounted from analysis. The estimated percent of cutting is shown below each lane. A 100 bp ladder was used.

[0282] FIG. 5: Nucleofection of paired gRNAs results in an exon 45-55 deletion in CDMD hiPSCs. FIG. 5A. PCR using primers flanking the deleted region show bands for successful deletion and rejoining after nucleofection of a variety of CRISPR pairs in hiPSC CDMD 1006. A 100 bp ladder was used. FIG. 5B. Examples of the types of different rejoined products identified after sequencing. FIG. 5C. The sequencing for 44C4+55C3* seamless rejoining is shown. FIG. 5D. Multiplex PCR shows an exon 45-55 deletion product in all lines nucleofected with 44C4 and 55C3 gRNAs. A significant increase in the efficiency of deletion in CDMD 1006 and 1003 after selection with 0.35 μg/ml puromycin for one day is shown. *3× the amount of 55C3 DNA was added during nucleofection. A 100 bp ladder was used.

Clonal Reframed DMD hiPSC Lines Contain No Off Target Activity at Candidate Sites

[0283] Stably deleted DMD hiPSC lines were generated from CDMD 1003 and 1006 by clonal selection after nucleofection with the gRNA pair 44C4 and 55C3 (FIG. 2B and FIG. 2C) and are pluripotent (FIG. 2C and FIG. 6B). All reframed lines were karyotypically normal except for one clone (CDMD 1003-81), which was found to contain a 1q32 amplification confirmed via FISH analysis (FIG. 6A), also observed in the original parental line and in all daughter clones after post-hoc analysis. The 1q32 amplification is common in hPSCs after extended propagation in culture (Dekel-Naftali et al., Eur. J. Hum. Genet., 2012. 20:1248-1255), and thus was not a result of CRISPR-mediated off target activity. To determine off target activity of the gRNAs, the top 10 homologous sites per guide were determined by COSMID (Cradick et al., Mol. Ther. Nucleic Acids, 2014. 3:e214) and sequenced in all clonal and parental lines. No off target mutations were observed at any site. All variants, besides a heterozygous SNP in chromosome 11, were detected in less than 1% of reads which is consistent with error in the sequencing method.

[0284] FIG. 6: Additional characterization of refrained lines. FIG. 6A. All refrained lines were determined to be karyotypically normal except for CDMD 1003-81, which was found to contain a 1q32 amplification via FISH analysis. Upon retrospective analysis, the 1q32 amplification was determined to have existed in the parent line (CDMD 1003 line at 22%) and was found in all daughter lines (CDMD 1003-57 and 1003-49 at 82.5%) and was not a result of CRISPR activity. FIG. 6B. Refrained lines CDMD 1006-1, 1003-49, 1003-57, and 1003-81 formed teratomas consisting of the three germ layers in vivo. FIG. 6C. Analysis of the mRNA from refrained lines. PCR using primers within the deleted region (red arrows) or flanking the deleted region (purple arrows) on dystrophin cDNA from hiPSC-derived cardiomyocytes shows undeleted bands in both CDMD 1002 and 1006 and deleted bands in both CDMD 1006-1 and 1003-49. A 100 bp ladder was used. FIG. 6D. Sequencing confirms exon 44 and 56 rejoining in reframed CDMD 1006-1 and 1003-49. FIG. 6E. Graph of data from CK release assay of hiPSC-derived cardiomyocytes exposed to hypoosmotic conditions below 240 mosmol. The same CDMD 1002 control data as in FIG. 4A are shown. Data are presented as average±standard error. FIG. 6F. CK release assay data normalized to out-of-frame cells and pooled from all experiments shown (n=6 for out-of-frame and reframed (n=5 for reframed 135 mosmol), n=4 for wild type). Data are presented as average±standard error.

Dystrophin (DYS^{Δ45-55}) Expression is Restored in Reframed DMD hiPSC-Derived Cardiomyocytes and Skeletal Myotubes

[0285] CRISPR/Cas9-mediated deletion of DMD should result in an internally deleted dystrophin protein lacking exons 45-55 (hereafter referred to as DYS^{Δ45-55}). As hiPSCs do not express dystrophin, the refrained DMD hiPSC clonal lines were differentiated to two disease-relevant cell types, cardiomyocytes and skeletal muscle myotubes, using directed differentiation or overexpression of MyoD to evaluate rescue of DYS^{Δ45-55}. PCR and sequencing of the exon 44/56 boundary in cDNA from the refrained cardiomyocyte clones demonstrated correct splicing of the dystrophin transcript (FIG. 6C and FIG. 6D). Additionally, both the reframed cardiac and skeletal muscle cell lines restored dystrophin expression as assayed by immunocytochemistry and Western blot (FIG. 7A-FIG. 7C). Compared to wild type CDMD 1002 or human skeletal muscle myotubes (HSMM), the band was truncated by ˜66 kDa as expected.

[0286] FIG. 7: Refrained CDMD hiPSC-derived skeletal muscle and cardiomyocytes restore dystrophin expression. FIG. 7A. Immunocytochemical staining of human myosin heavy chain (MyHC, red) and dystrophin (green) of wild type (CDMD 1002), out-of-frame (CDMD 1003, 1006) or refrained (CDMD 1003-49, 1006-1) cardiomyocytes derived from hiPSCs by directed differentiation. Inset depicts zoomed in region defined by the white box. Scale bar 50 μm. FIG. 7B. Immunocytochemical staining of MyHC (red) and dystrophin (green) of wild type (CDMD 1002), out-of-frame (CDMD 1006) or refrained (CDMD 1006-1, 1003-49) skeletal muscle myotubes derived from hiPSCs. Myotubes were fused after MyoD overexpression (OE) or from sorted NCAM⁺ cells after an adapted directed differentiation 50-day protocol. Inset depicts zoomed in region defined by the white box. Scale bar 100 μm. FIG. 7C. Western blots of cell extracts probed with anti-dystrophin. Extracts were from out-of-frame and reframed cardiomyocytes (left) and skeletal muscle myotubes (right), derived from CDMD hiPSCs. Wild type (wt) hiPSCs (CDMD 1002) or human skeletal muscle myotubes (HSMM) were used as a control for dystrophin. The molecular weight shift caused by the exon 45-55 deletion (1779 bp, ˜66 kDa) is evident in reframed vs. wild type dystrophin (arrows). A non-specific band around 220 kDa was seen in some samples. Samples were also probed with anti-MyHC as a loading control (bottom panels).

### DYS^{Δ45-55} Protein Restores Membrane Functionality to Cardiomyocytes and Skeletal Myotubes In Vitro

[0287] Cardiomyocytes or skeletal myotubes lacking dystrophin demonstrate membrane fragility in vitro and respond to osmotic stress by releasing elevated levels of CK (Guan et al., Stem Cell Res., 2014. 12:467-480; Menke and Jockusch, J. Cell Sci., 1995. 108:727-733), as is seen in human patients (Pearce et al., J. Neurol. Neurosurg. Psychiatry, 1964. 27:181-185). To determine whether DYS^{Δ45-55} could restore stability to dystrophic plasma membranes, differentiated cardiomyocytes and skeletal muscle myotubes derived from reframed and out-of-frame hiPSCs were subjected to hypoosmotic conditions. Cells were stressed by incubation in hypoosmolar solutions (66-240 mosmol) and CK release into the supernatant was measured to show functional improvement after dystrophin restoration. Both the reframed CDMD 1003-49 cardiomyocytes and skeletal muscle cells demonstrated reduced CK release, similar to wild type (CDMD 1002), versus the out-of-frame CDMD 1003 cells, indicating that DYS^{Δ45-55} was capable of reducing membrane fragility (FIG. 8A). The same trend was also observed with CDMD 1006/1006-1 cardiomyocytes (FIG. 6E). After normalizing and pooling all experiments, it was observed that significantly less CK was released at 93, 135, and 240 mosmol in the reframed and wild type cells compared to out-of-frame (FIG. 6F).

[0288] FIG. 8: Refrained hiPSC-derived cardiomyocytes and skeletal muscle cells demonstrate restored function in vitro and in vivo. FIG. 8A. Representative graphs of CK release assays from cells exposed to hypoosmotic conditions. Cardiomyocytes and skeletal muscle myotubes derived from hiPSCs were subjected to a range of osmolarities below 240 mosmol and CK release to the supernatant was measured as an indication of membrane fragility. Data are presented as average ±standard error. FIG. 8B. Fold change in expression of miR31 measured by ddPCR in myotubes derived from out-of-frame or refrained hiPSCs by MyoD OE, normalized to wild type (CDMD 1002). Data are presented as average±standard deviation. FIG. 8C. Western blots of cell extracts probed with anti-p-dystroglycan. Extracts were from out-of-frame and refrained skeletal muscle myotubes derived by MyoD OE. HSMM was used as a positive control. Samples were also probed with anti-MyHC as a loading control (bottom panel). FIG. 8D. Immunocytochemical staining of MyHC (red) and P-dystroglycan (green), a component of the DGC, in wild type (CDMD 1002), out-of-frame (CDMD 1006) or refrained (CDMD 1006-1) skeletal muscle myotubes. Inset depicts zoomed in region defined by the white box. Scale bar 50 μm. FIG. 8E. Assessment of human dystrophin restoration in wild type (CDMD 1002), out-of-frame (CDMD 1003), and refrained (CDMD 1003-49) MyoD OE cells engrafted into the TA of NSG-mdx mice. Engrafted human cells were identified by co-immunostaining for human spectrin and lamin A/C (shown in red). Positive staining for human dystrophin is shown in green and all fibers are shown using laminin (grey). All sections were stained with DAPI (blue) to identify nuclei. Scale bar 100 μm. FIG. 8F. Assessment of P-dystroglycan restoration in human fibers from wild type (CDMD 1002), out-of-frame (CDMD 1003), and refrained (CDMD 1003-49) MyoD OE cells engrafted into the TA of NSG-mdx mice. Engrafted human cells were identified by co-immunostaining for human spectrin and lamin A/C (shown in red). Positive staining for dystrophin is shown in grey and P-dystroglycan is shown in green. All sections were stained with DAPI (blue) to identify nuclei. Cell order is same as noted in FIG. 8E. Scale bar 20 μm.

CRISPR/Cas9 Reframing Correlates with miR31 Levels in Skeletal Myotubes In Vitro

[0289] Elevated levels of miR31 have been observed in DMD patient biopsies compared to wild type or BMD (Cacchiarelli et al., EMBO Rep., 2011. 12:136-141). Levels of miR31 were measured using droplet digital PCR (ddPCR) after differentiation of out-of-frame and refrained CDMD hiPSCs to skeletal myotubes. Reframing DMD reduced levels of miR31 (similar to wild type cells), compared to out-of-frame DMD, as is observed in human dystrophinopathies (FIG. 8B). Thus, reframing the DMD gene normalizes miR31 levels similar to BMD, demonstrating functional rescue of the dystrophic phenotype to a BMD phenotype.

### DYS^{Δ45-55} Protein Restores the DGC In Vitro and In Vivo

[0290] As a third assay of DYS^{Δ45-55} functionality, its ability to restore the DGC in vitro and in vivo was evaluated. The DGC member, p-dystroglycan, was restored and detected at the membrane of reframed hiPSCs, but not out-of-frame hiPSCs, after directed differentiation to skeletal muscle in vitro by immunostaining and Western blot (FIG. 8C and FIG. 8D). Additionally, skeletal muscle cells derived from a wild type (CDMD 1002), out-of-frame (CDMD 1003), or refrained (CDMD 1003-49) hiPSC line were injected into the tibialis anterior of NSG-mdx mice. Correctly localized dystrophin and P-dystroglycan was only observed in engrafted human cells (demarked by human lamin A/C and spectrin) from the refrained or wild type lines (FIG. 8E and FIG. 8F). These studies taken together with the hypoosmotic stress assays demonstrate the ability of DYS^{Δ45-55} to functionally reassemble the DGC and restore membrane stability in vitro and in vivo.

### Example 2: In Vivo Electroporation of CRISPR Platform Results in Exon 45-55 Deletion in hDMD Mice

[0291] hDMD mice were electroporated with the CRISPR platform and resulted in deletion of exon 45-55.

[0292] FIG. 9: FIG. 9A. hDMD mice electroporated with a GFP plasmid into one FDB muscle showed expression of GFP under regular (top) or UV (bottom) light. FIG. 9B. Multiplex PCR on genomic DNA harvested from the FDB muscle of hDMD mice electroporated with the CRISPR plasmids containing gRNAs 44C4 and 55C3 demonstrated a deleted PCR product in one mouse (*). FIG. 9C. Sequencing of the rejoining region confirmed effective exon 45-55 deletion and revealed a 1 bp insertion at the intron 44 (144) and 55 (155) boundary.

[0293] In vivo electroporation was conducted as follows. hDMD mice ('t Hoen et al. (2008) J. Biol. Chem. 283:5899) at 8 weeks of age were electroporated with 23 g of pmax GFP plasmid as a control or 28 μg px330 plasmid DNA, half containing guide sequence 44C4 and half containing guide sequence 55C3. First, 5 μl hyaluronidase was injected into the flexor digitorum brevis (FDB) muscle. One hour after the hyaluronidase treatment, plasmid DNA was injected into the FDB muscle and electroporated 20 times at 100V for 20 milliseconds. 10 days following injection and electroporation, FDB muscle was harvested and digested with proteinase K; genomic DNA was isolated from the digested muscle using the Quick gDNA Mini Prep Kit (Zymo).

### Example 3: Various Pairs of Guide RNAs were Used for Successful Genomic Deletion

[0294] FIG. 10 depicts a schematic depiction of guide RNAs that were tested (e.g., see Table 2; FIG. 23) and expected deletion size (‘total deletion distance’). FIG. 11 depicts gels showing successful genomic deletion with various pairs of guide RNAs in 293T cells. FIG. 12 depicts gels showing successful genomic deletion with various pairs of guide RNAs in 293T cells. FIG. 13 depicts gels showing successful genomic deletion with various pairs of guide RNAs in iPSC cells. FIG. 14 depicts a gel showing successful genomic deletion with various pairs of guide RNAs in iPSC cells. FIG. 15 depicts a gel showing successful genomic deletion with various pairs of guide RNAs in iPSC cells. FIG. 16 depicts a gel showing successful genomic deletion with various pairs of guide RNAs in iPSC cells. FIG. 17 depicts gels showing successful genomic deletion with a pair of guide RNAs. FIG. 18 depicts a gel showing successful genomic deletion with a pair of guide RNAs.

[0295] Additional guide sequences of guide RNAs (and target sequences) are provided in FIG. 24 (Table 9). FIG. 19 provides activity of single-guide cutting activity in HEK293FT cells. FIG. 20 provides surveyor data for the “44” series of guide RNAs. FIG. 21 provides genomic deletion data for the “44” series of guide RNAs in combination with “55” series of guide RNAs. FIG. 22A provides surveyor data for the “55” series of guide RNAs. FIG. 22B provides genomic deletion data for combinations of “44” guide RNAs with “55” guide RNAs, specifically: 1) 44C4 +55C3; and 2) 44C4+55C8d.

[0296] While the present invention has been described with reference to the specific embodiments thereof, it should be understood by those skilled in the art that various changes may be made and equivalents may be substituted without departing from the true spirit and scope of the invention. In addition, many modifications may be made to adapt a particular situation, material, composition of matter, process, process step or steps, to the objective, spirit and scope of the present invention. All such modifications are intended to be within the scope of the claims appended hereto.

1-54. (canceled)

55. A composition comprising:
(a) a first CRISPR/Cas guide RNA (gRNA) comprising a first guide sequence having 100% complementarity over 17 or more contiguous nucleotides with a first target sequence within intron 44 of a mutant dystrophin gene, or a nucleic acid encoding said first CRISPR/Cas gRNA, and
(b) a second CRISPR/Cas gRNA comprising a second guide sequence having 100% complementarity over 17 contiguous or more nucleotides with a second target sequence within intron 55 of the mutant dystrophin gene, or a nucleic acid encoding said second CRISPR/Cas gRNA,
wherein the mutant dystrophin gene comprises a mutation within the exon 45-55 region, and
wherein the first and second target sequences are separated from each other by about 700 kb to about 725 kb as measured by the corresponding distance in a wild type dystrophin gene that does not comprise the mutation.

56. The composition of claim 55, wherein the guide sequence of the first CRISPR/Cas gRNA comprises:
(a) the nucleotide sequence set forth in any one of SEQ ID NOs: 1155-1159, or
(b) the nucleotide sequence set forth in any one of SEQ ID NOs: 1150-1154 and SEQ ID NOs: 1223-1269.

57. The composition of claim 55, wherein the guide sequence of the second CRISPR/Cas gRNA comprises:
(a) the nucleotide sequence set forth in any of SEQ ID NOs: 1175-1179, or
(b) the nucleotide sequence set forth in any of SEQ ID NOs: 1170-1174 and SEQ ID NOs: 1318-1365.

58. The composition of claim 55, wherein
(a) the guide sequence of the first CRISPR/Cas gRNA comprises SEQ ID NO: 1158, and the guide sequence of the second CRISPR/Cas gRNA comprises SEQ ID NO: 1177; or
(b) the guide sequence of the first CRISPR/Cas gRNA comprises SEQ ID NO: 1153 and the guide sequence of the second CRISPR/Cas gRNA comprises SEQ ID NO: 1172.

59. The composition of claim 55, wherein the guide sequence of the first CRISPR/Cas gRNA has 100% complementarity over 20 contiguous nucleotides with the first target sequence, and the guide sequence of the second CRISPR/Cas gRNA has 100% complementarity over 20 contiguous nucleotides with the second target sequence.

60. The composition of claim 55, further comprising a class 2 CRISPR/Cas endonuclease, or a nucleic acid encoding said class 2 CRISPR/Cas endonuclease.

61. The composition of claim 60, wherein the class 2 CRISPR/Cas endonuclease is:
a type II CRISPR/Cas endonuclease;
a type V CRISPR/Cas endonuclease; or
a type VI CRISPR/Cas endonuclease.

62. The composition of claim 60, wherein the class 2 CRISPR/Cas endonuclease is a Cas9 protein, a Cpf1 protein, a C2c1 protein, a C2c3 protein, or a C2c2 protein.

63. The composition of claim 61, wherein the class 2 CRISPR/Cas endonuclease is a Cas9 protein and the first and second gRNAs are Cas9 gRNAs.

64. The composition of claim 61, wherein the class 2 CRISPR/Cas endonuclease is a Cpf1 protein and the first and second gRNAs are Cpf1 gRNAs.

65. The composition of claim 55, wherein the first and second CRISPR/Cas gRNAs are single molecule CRISPR/Cas gRNAs.

66. The composition of claim 55, wherein the composition is formulated as a kit for modifying a mutant dystrophin gene in the genome of a cell.

67. A method for modifying a mutant dystrophin gene in the genome of a mammalian cell, the method comprising administering into the cell:
(a) a composition according to claim 55 into a cell comprising a mutant dystrophin gene, wherein the mutant dystrophin gene comprises a mutation within the exon 45-55 region, and
(b) a class 2 CRISPR/Cas endonuclease, or a nucleic acid encoding said class 2 CRISPR/Cas endonuclease,
wherein said administration generates a modified mutant dystrophin gene comprising a deletion of a region between the first and second target sequences, wherein the deletion size is about 700 kb to about 725 kb as measured by the corresponding deletion size in a wild type gene that does not comprise the mutation, thereby producing a modified cell comprising a modified mutant dystrophin gene,
wherein the modified mutant dystrophin gene encodes an in-frame transcript with flanking exon 44 joined with flanking exon 56 and has an intron therebetween of about 1 kb, wherein said intron comprises about 500 bp of the 5′ end of intron 44 and the 3′ end of intron 55.

68. The method of claim 67, wherein the cell is in vitro, ex vivo, or in vivo.

69. The method of claim 67, wherein the cell is a muscle cell, a muscle stem cell, a cardiomyocyte, a myogenic precursor cell, a pericyte, a muscle cell derived from an induced pluripotent stem (iPS) cell, or an induced pluripotent stem (iPS) cell.

70. The method of claim 67, wherein the cell is a murine cell, a canine cell, or a porcine cell.

71. The method of claim 67, wherein the cell is a human cell.

72. The method of claim 68, wherein the cell is in vitro or ex vivo, and wherein the method includes, after said introducing, a step of transplanting the modified cell into an individual.

73. The method of claim 72, wherein the cell is autologous to the individual.

74. A method for treating a disease in a subject in need thereof having a mutant dystrophin gene, the method comprising:
administering a composition according to claim 60 into a subject having a mutant dystrophin gene, wherein the mutant dystrophin gene comprises a mutation within the exon 45-55 region, wherein said administration generates a modified mutant dystrophin gene comprising a deletion of a region between the first and second target sequences wherein the deletion size is about 700 kb to about 725 kb as measured by the corresponding deletion size in a wild type gene that does not comprise the mutation,
wherein the modified mutant dystrophin gene encodes an in-frame transcript with flanking exon 44 joined with flanking exon 56 and has an intron therebetween of about 1 kb, wherein said intron comprises about 500 bp of the 5′ end of intron 44 and the 3′ end of intron 55.

The application's sequence listing, which the Patent Office published only in electronic form, follows.

SEQUENCE LISTING (1409 sequences)

SEQ ID NO: 1 - protein, 15 aa, synthetic construct
  REGION 1..15: note = synthetic sequence
IGLDIGTNSVGWAVI

SEQ ID NO: 2 - protein, 8 aa, synthetic construct
  REGION 1..8: note = synthetic sequence
IVIEMARE

SEQ ID NO: 3 - protein, 27 aa, synthetic construct
  REGION 1..27: note = synthetic sequence
DVDHIVPQSFLKDDSIDNKVLTRSDKN

SEQ ID NO: 4 - protein, 8 aa, synthetic construct
  REGION 1..8: note = synthetic sequence
HHAHDAYL

SEQ ID NO: 5 - protein, 1368 aa, Streptococcus pyogenes [sequence omitted]

SEQ ID NO: 6 - protein, 1367 aa, Streptococcus pyogenes
MDKKYSIGLDIGTNSVGWAVITDDYKVPSKKLKVLGNTDRHGIKKNLIGALLFDSGETAEATRLKRTARRRYTRRKNRICYLQEIFSNEMAKVDDSFFHRLEESFLVEEDKKHERHPIFGNIVDEVAYHEKYPTIYHLRKKLADSTDKVDLRLIYLALAHMIKFRGHFLIEGDLNPDNSDVDKLFIQLVQTYNQLFEENPINASRVDAKAILSARLSKSRRLENLIAQLPGEKKNGLFGNLIALSLGLTPNFKSNFDLAEDAKLQLSKDTYDDDLDNLLAQIGDQYADLFLAAKNLSDAILLSDILRVNSEITKAPLSASMIKRYDEHHQDLTLLKALVRQQLPEKYKEIFFDQSKNGYAGYIDGGASQEEFYKFIKPILEKMDGTEELLAKLNREDLLRKQRTFDNGSIPYQIHLGELHAILRRQEDFYPFLKDNREKIEKILTFRIPYYVGPLARGNSRFAWMTRKSEETITPWNFEEVVDKGASAQSFIERMTNFDKNLPNEKVLPKHSLLYEYFTVYNELTKVKYVTEGMRKPAFLSGEQKKAIVDLLFKTNRKVTVKQLKEDYFKKIECFDSVEISGVEDRFNTSLGTYHDLLKIIKDKDFLDNEENEDILEDIVLTLTLFEDKEMIEERLKKYANLFDDKVMKQLKRRHYTGWGRLSRKLINGIRDKQSGKTILDFLKSDGFANRNFMQLINDDSLTFKEAIQKAQVSGQGHSLHEQIANLAGSPAIKKGILQTVKIVDELVKVMGHKPENIVIEMARENQTTQKGQKNSRERMKRIEEGIKELGSQILKEHPVENTQLQNEKLYLYYLQNGRDMYVDQELDINRLSDYDVDHIVPQSFLKDDSIDNKVLTRSDKNRGKSDNVPSEEVVKKMKNYWRQLLNAKLITQRKFDNLTKAERGGLSELDKAGFIKRQLVETRQITKHVAQILDSRMNTKYDENDKLIREVKVITLKSKLVSDFRKDFQFYKVREINNYHHAHDAYLNAVVGTALIKKYPKLESEFVYGDYKVYDVRKMIAKSEQEIGKATAKYFFYSNIMNFFKTEITLANGEIRKRPLIETNGETGEIVWDKGRDFATVRKVLSMPQVNIVKKTEVQTGGFSKESILPKRNSDKLIARKKDWDPKKYGGFDSPTVAYSVLVVAKVEKGKSKKLKSVKELLGITIMERSSFEKNPIDFLEAKGYKEVRKDLIIKLPKYSLFELENGRKRMLASAGELQKGNELALPSKYVNFLYLASHYEKLKGSPEDNEQKQLFVEQHKHYLDEIIEQISEFSKRVILADANLDKVLSAYNKHRDKPIREQAKNIIHLFTLTNLGAPAAFKYFDTTIERNRYKSIKEVLDATLIHQSITGLYEIRIDLSQLGGD

SEQ ID NO: 7 - protein, 1056 aa, Pasteurella multocida
MQTTNLSYILGLDLGIASVGWAVVEINENEDPIGLIDVGVRIFERAEVPKTGESLALSRRLARSTRRLIRRRAHRLLLAKRFLKREGILSTIDLEKGLPNQAWELRVAGLERRLSAIEWGAVLLHLIKHRGYLSKRKNESQTNNKELGALLSGVAQNHQLLQSDDYRTPAELALKKFAKEEGHIRNQRGAYTHTFNRLDLLAELNLLFAQQHQFGNPHCKEHIQQYMTELLMWQKPALSGEAILKMLGKCTHEKNEFKAAKHTYSAERFVWLTKLNNLRILEDGAERALNEEERQLLINHPYEKSKLTYAQVRKLLGLSEQAIFKHLRYSKENAESATFMELKAWHAIRKALENQGLKDTWQDLAKKPDLLDEIGTAFSLYKTDEDIQQYLTNKVPNSVINALLVSLNFDKFIELSLKSLRKILPLMEQGKRYDQACREIYGHHYGEANQKTSQLLPAIPAQEIRNPVVLRTLSQARKVINAIIRQYGSPARVHIETGRELGKSFKERREIQKQQEDNRTKRESAVQKFKELFSDFSSEPKSKDILKFRLYEQQHGKCLYSGKEINIHRLNEKGYVEIDHALPFSRTWDDSFNNKVLVLASENQNKGNQTPYEWLQGKINSERWKNFVALVLGSQCSAAKKQRLLTQVIDDNKFIDRNLNDTRYIARFLSNYIQENLLLVGKNKKNVFTPNGQITALLRSRWGLIKARENNNRHHALDAIVVACATPSMQQKITRFIRFKEVHPYKIENRYEMVDQESGEIISPHFPEPWAYFRQEVNIRVFDNHPDTVLKEMLPDRPQANHQFVQPLFVSRAPTRKMSGQGHMETIKSAKRLAEGISVLRIPLTQLKPNLLENMVNKEREPALYAGLKARLAEFNQDPAKAFATPFYKQGGQQVKAIRVEQVQKSGVLVRENNGVADNASIVRTDVFIKNNKFFLVPIYTWQVAKGILPNKAIVAHKNEDEWEEMDEGAKFKFSLFPNDLVELKTKKEYFFGYYIGLDRATGNISLKEHDGEISKGKDGVYRVGVKLALSFEKYQVDELGKNRQICRPQQRQPVR

SEQ ID NO: 8 - protein, 1368 aa, Streptococcus pyogenes
MDKKYSIGLDIGTNSVGWAVITDDYKVPSKKLKGLGNTDRHGIKKNLIGALLFDSGETAEATRLKRTARRRYTRRKNRICYLQEIFSNEMAKVDDSFFHRLEESFLVEEDKKHERHPIFGNIVDEVAYHEKYPTIYHLRKKLADSTDKVDLRLIYLALAHMIKFRGHFLIEGDLNPDNSDVDKLFIQLVQTYNQLFEENPINASRVDAKAILSARLSKSRRLENLIAQLPGEKKNGLFGNLIALSLGLTPNFKSNFDLAEDAKLQLSKDTYDDDLDNLLAQIGDQYADLFLAAKNLSDATLLSDILRVNSEITKAPLSASMIKRYDEHHQDLTLLKALVRQQLPEKYKEIFFDQSKNGYAGYIDGGASQEEFYKFIKPILEKMDGTEELLAKLNREDLLRKQRTFDNGSIPYQIHLGELHAILRRQEDFYPFLKDNREKIEKILTFRIPYYVGPLARGNSRFAWMTRKSEETITPWNFEEVVDKGASAQSFIERMTNFDKNLPNEKVLPKHSLLYEYFTVYNELTKVKYVTEGMRKPAFLSGEQKKAIVDLLFKTNRKVTVKQLKEDYFKKIECFDSVEISGVEDRFNASLGTYHDLLKIIKDKDFLDNEENEDILEDIVLTLTLFEDREMIEERLKTYAHLFDDKVMKQLKRRRYTGWGRLSRKLINGIRDKQSGKTILDFLKSDGFANRNFMQLIHDDSLTFKEDIQKAQVSGQGDSLHEHIANLAGSPAIKKGILQTVKVVDELVKVMGRHKPENIVIEMARENQTTQKGQKNSRERMKRIEEGIKELGSDILKEYPVENTQLQNEKLYLYYLQNGRDMYVDQELDINRLSDYDVDHIVPQSFLKDDSIDNKVLTRSDKNRGKSDNVPSEEVVKKMKNYWRQLLNAKLITQRKFDNLTKAERGGLSELDKVGFIKRQLVETRQITKHVAQILDSRMNTKYDENDKLIREVRVITLKSKLVSDFRKDFQFYKVREINNYHHAHDAYLNAVVGTALIKKYPKLESEFVYGDYKVYDVRKMIAKSEQEIGKATAKYFFYSNIMNFFKTEITLANGEIRKRPLIETNGETGEIVWDKGRDFATVRKVLSMPQVNIVKKTEVQTGGFSKESILPKRNSDKLIARKKDWDPKKYGGFDSPTVAYSVLVVAKVEKGKSKKLKSVKELLGITIMERSSFEKDPIDFLEAKGYKEVRKDLIIKLPKYSLFELENGRKRMLASAGELQKGNELALPSKYVNFLYLASHYEKLKGSPEDNEQKQLFVEQHKHYLDEIIEQISEFSKRVILADANLDKVLSAYNKHRDKPIREQAENIIHLFTLTNLGAPAAFKYFDTTIDRKRYTSTKEVLDATLIHQSITGLYETRIDLSQLGGD

SEQ ID NO: 9 - protein, 1334 aa, Listeria innocua
MKKPYTIGLDIGTNSVGWAVLTDQYDLVKRKMKIAGDSEKKQIKKNFWGVRLFDEGQTAADRRMARTARRRIERRRNRISYLQGIFAEEMSKTDANFFCRLSDSFYVDNEKRNSRHPFFATIEEEVEYHKNYPTIYHLREELVNSSEKADLRLVYLALAHIIKYRGNFLIEGALDTQNTSVDGIYKQFIQTYNQVFASGIEDGSLKKLEDNKDVAKILVEKVTRKEKLERILKLYPGEKSAGMFAQFISLIVGSKGNFQKPFDLIEKSDIECAKDSYEEDLESLLALIGDEYAELFVAAKNAYSAVVLSSIITVAETETNAKLSASMIERFDTHEEDLGELKAFIKLHLPKHYEEIFSNTEKHGYAGYIDGKTKQADFYKYMKMTLENIEGADYFIAKIEKENFLRKQRTFDNGAIPHQLHLEELEAILHQQAKYYPFLKENYDKIKSLVTFRIPYFVGPLANGQSEFAWLTRKADGEIRPWNIEEKVDFGKSAVDFIEKMTNKDTYLPKENVLPKHSLCYQKYLVYNELTKVRYINDQGKTSYFSGQEKEQIFNDLFKQKRKVKKKDLELFLRNMSHVESPTIEGLEDSFNSSYSTYHDLLKVGIKQEILDNPVNTEMLENIVKILTVFEDKRMIKEQLQQFSDVLDGVVLKKLERRHYTGWGRLSAKLLMGIRDKQSHLTILDYLMNDDGLNRNLMQLINDSNLSFKSIIEKEQVTTADKDIQSIVADLAGSPAIKKGILQSLKIVDELVSVMGYPPQTIVVEMARENQTTGKGKNNSRPRYKSLEKAIKEFGSQILKEHPTDNQELRNNRLYLYYLQNGKDMYTGQDLDIHNLSNYDIDHIVPQSFITDNSIDNLVLTSSAGNREKGDDVPPLEIVRKRKVFWEKLYQGNLMSKRKFDYLTKAERGGLTEADKARFIHRQLVETRQITKNVANILHQRFNYEKDDHGNTMKQVRIVTLKSALVSQFRKQFQLYKVRDVNDYHHAHDAYLNGVVANTLLKVYPQLEPEFVYGDYHQFDWFKANKATAKKQFYTNIMLFFAQKDRIIDENGEILWDKKYLDTVKKVMSYRQMNIVKKTEIQKGEFSKATIKPKGNSSKLIPRKTNWDPMKYGGLDSPNMAYAVVIEYAKGKNKLVFEKKIIRVTIMERKAFEKDEKAFLEEQGYRQPKVLAKLPKYTLYECEEGRRRMLASANEAQKGNQQVLPNHLVTLLHHAANCEVSDGKSLDYIESNREMFAELLAHVSEFAKRYTLAEANLNKINQLFEQNKEGDIKAIAQSFVDLMAFNAMGAPASFKFFETTIERKRYNNLKELLNSTIIYQSITGLYESRKRLDD

SEQ ID NO: 10 - protein, 1368 aa, Streptococcus pyogenes; identical to SEQ ID NO: 8

SEQ ID NO: 11 - protein, 1370 aa, Streptococcus agalactiae
MNKPYSIGLDIGTNSVGWSIITDDYKVPAKKMRVLGNTDKEYIKKNLIGALLFDGGNTAADRRLKRTARRRYTRRRNRILYLQEIFAEEMSKVDDSFFHRLEDSFLVEEDKRGSKYPIFATLQEEKDYHEKFSTIYHLRKELADKKEKADLRLIYIALAHIIKFRGHFLIEDDSFDVRNTDISKQYQDFLEIFNTTFENNDLLSQNVDVEAILTDKISKSAKKDRILAQYPNQKSTGIFAEFLKLIVGNQADFKKYFNLEDKTPLQFAKDSYDEDLENLLGQIGDEFADLFSAAKKLYDSVLLSGILTVIDLSTKAPLSASMIQRYDEHREDLKQLKQFVKASLPEKYQEIFADSSKDGYAGYIEGKTNQEAFYKYLSKLLTKQEDSENFLEKIKNEDFLRKQRTFDNGSIPHQVHLTELKAIIRRQSEYYPFLKENQDRIEKILTFRIPYYIGPLAREKSDFAWMTRKTDDSIRPWNFEDLVDKEKSAEAFIHRMTNNDFYLPEEKVLPKHSLIYEKFTVYNELTKVRYKNEQGETYFFDSNIKQEIFDGVFKEHRKVSKKKLLDFLAKEYEEFRIVDVIGLDKENKAFNASLGTYHDLEKILDKDFLDNPDNESILEDIVQTLTLFEDREMIKKRLENYKDLFTESQLKKLYRRHYTGWGRLSAKLINGIRDKESQKTILDYLIDDGRSNRNFMQLINDDGLSFKSIISKAQAGSHSDNLKEVVGELAGSPAIKKGILQSLKIVDELVKVMGYEPEQIVVEMARENQTTNQGRRNSRQRYKLLDDGVKNLASDLNGNILKEYPTDNQALQNERLFLYYLQNGRDMYTGEALDIDNLSQYDIDHIIPQAFIKDDSIDNRVLVSSAKNRGKSDDVPSLEIVKDCKVFWKKLLDAKLMSQRKYDNLTKAERGGLTSDDKARFIQRQLVETRQITKHVARILDERFNNELDSKGRRIRKVKIVTLKSNLVSNFRKEFGFYKIREVNNYHHAHDAYLNAVVAKAILTKYPQLEPEFVYGDYPKYNSYKTRKSATEKLFFYSNIMNFFKTKVTLADGTVVVKDDIEVNNDTGEIVWDKKKHFATVRKVLSYPQNNIVKKTEIQTGGFSKESILAHGNSDKLIPRKTKDIYLDPKKYGGFDSPIVAYSVLVVADIKKGKAQKLKTVTELLGITIMERSRFEKNPSAFLESKGYLNIRADKLIILPKYSLFELENGRRRLLASAGELQKGNELALPTQFMKFLYLASRYNESKGKPEEIEKKQEFVNQHVSYFDDILQLINDFSKRVILADANLEKINKLYQDNKENISVDELANNIINLFTFTSLGAPAAFKFFDKIVDRKRYTSTKEVLNSTLIHQSITGLYETRIDLGKLGED

SEQ ID NO: 12 - protein, 1345 aa, Streptococcus mutans
MKKPYSIGLDIGTNSVGWAVVTDDYKVPAKKMKVLGNTDKSHIEKNLLGALLFDSGNTAEDRRLKRTARRRYTRRRNRILYLQEIFSEEMGKVDDSFFHRLEDSFLVTEDKRGERHPIFGNLEEEVKYHENFPTIYHLRQYLADNPEKVDLRLVYLALAHIIKFRGHFLIEGKFDTRNNDVQRLFQEFLAVYDNTFENSSLQEQNVQVEEILTDKISKSAKKDRVLKLFPNEKSNGRFAEFLKLIVGNQADFKKHFELEEKAPLQFSKDTYEEELEVLLAQIGDNYAELFLSAKKLYDSILLSGILTVTDVGTKAPLSASMIQRYNEHQMDLAQLKQFIRQKLSDKYNEVFSDVSKDGYAGYIDGKTNQEAFYKYLKGLLNKIEGSGYFLDKIEREDFLRKQRTFDNGSIPHQIHLQEMRAIIRRQAEFYPFLADNQDRIEKLLTFRIPYYVGPLARGKSDFAWLSRKSADKITPWNFDEIVDKESSAEAFINRMTNYDLYLPNQKVLPKHSLLYEKFTVYNELTKVKYKTEQGKTAFFDANMKQEIFDGVFKVYRKVTKDKLMDFLEKEFDEFRIVDLTGLDKENKVFNASYGTYHDLCKILDKDFLDNSKNEKILEDIVLTLTLFEDREMIRKRLENYSDLLTKEQVKKLERRHYTGWGRLSAELIHGIRNKESRKTILDYLIDDGNSNRNFMQLINDDALSFKEEIAKAQVIGETDNLNQVVSDIAGSPAIKKGILQSLKIVDELVKIMGHQPENIVVEMARENQFTNQGRRNSQQRLKGLTDSIKEFGSQILKEHPVENSQLQNDRLFLYYLQNGRDMYTGEELDIDYLSQYDIDHIIPQAFIKDNSIDNRVLTSSKENRGKSDDVPSKDVVRKMKSYWSKLLSAKLITQRKFDNLTKAERGGLTDDDKAGFIKRQLVETRQITKHVARILDERFNTETDENNKKIRQVKIVTLKSNLVSNFRKEFELYKVREINDYHHAHDAYLNAVIGKALLGVYPQLEPEFVYGDYPHFHGHKENKATAKKFFYSNIMNFFKKDDVRTDKNGEIIWKKDEHISNIKKVLSYPQVNIVKKVEEQTGGFSKESILPKGNSDKLIPRKTKKFYWDTKKYGGFDSPIVAYSILVIADIEKGKSKKLKTVKALVGVTIMEKMTFERDPVAFLERKGYRNVQEENIIKLPKYSLFKLENGRKRLLASARELQKGNEIVLPNHLGTLLYHAKNIHKVDEPKHLDYVDKHKDEFKELLDVVSNFSKKYTLAEGNLEKIKELYAQNNGEDLKELASSFINLLTFTAIGAPATFKFFDKNIDRKRYTSTTEILNATLIHQSITGLYETRIDLNKLGGD

SEQ ID NO: 13 - protein, 1377 aa, Streptococcus agalactiae
MNKPYSIGLDIGTNSVGWSIITDDYKVPAKKMRVLGNTDKEYIKKNLIGALLFDGGNTAADRRLKRTARRRYTRRRNRILYLQEIFAEEMSKVDDSFFHRLEDSFLVEEDKRGSKYPIFATMQEEKYYHEKFPTIYHLRKELADKKEKADLRLVYLALAHIIKFRGHFLIEDDRFDVRNTDIQKQYQAFLEIFDTTFENNHLLSQNVDVEAILTDKISKSAKKDRILAQYPNQKSTGIFAEFLKLIVGNQADFKKHFNLEDKTPLQFAKDSYDEDLENLLGQIGDEFADLFSVAKKLYDSVLLSGILTVTDLSTKAPLSASMIQRYDEHHEDLKHLKQFVKASLPENYREVFADSSKDGYAGYIEGKTNQEAFYKYLLKLLTKQEGSEYFLEKIKNEDFLRKQRTFDNGSIPHQVHLTELRAIIRRQSEYYPFLKENQDRIEKILTFRIPYYVGPLAREKSDFAWMTRKTDDSIRPWNFEDLVDKEKSAEAFIHRMTNNDLYLPEEKVLPKHSLIYEKFTVYNELTKVRFLAEGFKDFQFLNRKQKETIFNSLFKEKRKVTEKDIISFLNKVDGYEGIAIKGIEKQFNASLSTYHDLKKILGKDFLDNTDNELILEDIVQTLTLFEDREMIKKCLDIYKDFFTESQLKKLYRRHYTGWGRLSAKLINGIRNKENQKTILDYLIDDGSANRNFMQLINDDDLSFKPIIDKARTGSHSDNLKEVVGELAGSPAIKKGILQSLKIVDELVKVMGYEPEQIVVEMARENQTTAKGLSRSRQRLTTLRESLANLKSNILEEKKPKYVKDQVENHHLSDDRLFLYYLQNGRDMYTKKALDIDNLSQYDIDHIIPQAFIKDDSIDNRVLVSSAKNRGKSDDVPSIEIVKARKMFWKNLLDAKLMSQRKYDNLTKAERGGLTSDDKARFIQRQLVETRQITKHVARILDERFNNEVDNGKKICKVKIVTLKSNLVSNFRKEFGFYKIREVNDYHHAHDAYLNAVVAKAILTKYPQLEPEFVYGMYRQKKLSKIVHEDKEEKYSEATRKMFFYSNLMNMFKRVVRLADGSIVVRPVIETGRYMRKTAWDKKKHFATVRKVLSYPQNNIVKKTEIQTGGFSKESILAHGNSDKLIPRKTKDIYLDPKKYGGFDSPIVAYSVLVVADIKKGKAQKLKTVTELLGITIMERSRFEKNPSAFLESKGYLNIRDDKLMILPKYSLFELENGRRRLLASAGELQKGNELALPTQFMKFLYLASRYNESKGKPEEIEKKQEFVNQHVSYFDDILQLINDFSKRVILADANLEKINKLYQDNKENIPVDELANNIINLFTFTSLGAPAAFKFFDKIVDRKRYTSTKEVLNSTLIHQSITGLYETRIDLGKLGED

SEQ ID NO: 14 - protein, 131 aa, Helicobacter hepaticus
MRILGFDIGITSIGWAYVESNELKDCGVRIFTKAENPKNGDSLAAPRREARGARRRLARRKARLNAIKRLLCKEFELNLNDYLANDGELPKAYQTSKDTKSPYELYTAFHWIIFAFCSIASSLSNRQMLPI

SEQ ID NO: 15 - protein, 1059 aa, Wolinella succinogenes
MIERILGVDLGISSLGWAIVEYDKDDEAANRIIDCGVRLFTAAETPKKKESPNKARREARGIRRVLNRRRVRMNMIKKLFLRAGLIQDVDLDGEGGMFYSKANRADVWELRHDGLYRLLKGDELARVLIHIAKHRGYKFIGDDEADEESGKVKKAGVVLRQNFEAAGCRTVGEWLWRERGANGKKRNKHGDYEISIHRDLLVEEVEAIFVAQQEMRSTIATDALKAAYREIAFFVRPMQRIEKMVGHCTYFPEERRAPKSAPTAEKFIAISKFFSTVIIDNEGWEQKIIERKTLEELLDFAVSREKVEFRHLRKFLDLSDNEIFKGLHYKGKPKTAKKREATLFDPNEPTELEFDKVEAEKKAWISLRGAAKLREALGNEFYGRFVALGKHADEATKILTYYKDEGQKRRELTKLPLEAEMVERLVKIGFSDFLKLSLKAIRDILPAMESGARYDEAVLMLGVPHKEKSAILPPLNKTDIDILNPTVIRAFAQFRKVANALVRKYGAFDRVHFELAREINTKGEIEDIKESQRKNEKERKEAADWIAETSFQVPLTRKNILKKRLYIQQDGRCAYTGDVIELERLFDEGYCEIDHILPRSRSADDSFANKVLCLARANQQKTDRTPYEWFGHDAARWNAFETRTSAPSNRVRTGKGKIDRLLKKNFDENSEMAFKDRNLNDTRYMARAIKTYCEQYWVFKNSHTKAPVQVRSGKLTSVLRYQWGLESKDRESHTHHAVDAIIIAFSTQGMVQKLSEYYRFKETHREKERPKLAVPLANFRDAVEEATRIENTETVKEGVEVKRLLISRPPRARVTGQAHEQTAKPYPRIKQVKNKKKWRLAPIDEEKFESFKADRVASANQKNFYETSTIPRVDVYHKKGKFHLVPIYLHEMVLNELPNLSLGTNPEAMDENFFKFSIFKDDLISIQTQGTPKKPAKIIMGYFKNMHGANMVLSSINNSPCEGFTCTPVSMDKKHKDKCKLCPEENRIAGRCLQGFLDYWSQEGLRPPRKEFECDQGVKFALDVKKYQIDPLGYYYEVKQEKRLGTIPQMRSAKKLVKK

SEQ ID NO: 16 - protein, 1409 aa, Wolinella succinogenes
MLVSPISVDLGGKNTGFFSFTDSLDNSQSGTVIYDESFVLSQVGRRSKRHSKRNNLRNKLVKRLFLLILQEHHGLSIDVLPDEIRGLFNKRGYTYAGFELDEKKKDALESDTLKEFLSEKLQSIDRDSDVEDFLNQIASNAESFKDYKKGFEAVFASATHSPNKKLELKDELKSEYGENAKELLAGLRVTKEILDEFDKQENQGNLPRAKYFEELGEYIATNEKVKSFFDSNSLKLTDMTKLIGNISNYQLKELRRYFNDKEMEKGDIWIPNKLHKITERFVRSWHPKNDADRQRRAELMKDLKSKEIMELLTTTEPVMTIPPYDDMNNRGAVKCQTLRLNEEYLDKHLPNWRDIAKRLNHGKFNDDLADSTVKGYSEDSTLLHRLLDTSKEIDIYELRGKKPNELLVKTLGQSDANRLYGFAQNYYELIRQKVRAGIWVPVKNKDDSLNLEDNSNMLKRCNHNPPHKKNQIHNLVAGILGVKLDEAKFAEFEKELWSAKVGNKKLSAYCKNIEELRKTHGNTFKIDIEELRKKDPAELSKEEKAKLRLTDDVILNEWSQKIANFFDIDDKHRQRFNNLFSMAQLHTVIDTPRSGFSSTCKRCTAENRFRSETAFYNDETGEFHKKATATCQRLPADTQRPFSGKIERYIDKLGYELAKIKAKELEGMEAKEIKVPIILEQNAFEYEESLRKSKTGSNDRVINSKKDRDGKKLAKAKENAEDRLKDKDKRIKAFSSGICPYCGDTIGDDGEIDHILPRSHTLKIYGTVFNPEGNLIYVHQKCNQAKADSIYKLSDIKAGVSAQWIEEQVANIKGYKTFSVLSAEQQKAFRYALFLQNDNEAYKKVVDWLRTDQSARVNGTQKYLAKKIQEKLTKMLPNKHLSFEFILADATEVSELRRQYARQNPLLAKAEKQAPSSHAIDAVMAFVARYQKVFKDGTPPNADEVAKLAMLDSWNPASNEPLTKGLSTNQKIEKMIKSGDYGQKNMREVFGKSIFGENAIGERYKPIVVQEGGYYIGYPATVKKGYELKNCKVVTSKNDIAKLEKIIKNQDLISLKENQYIKIFSINKQTISELSNRYFNMNYKNLVERDKEIVGLLEFIVENCRYYTKKVDVKFAPKYIHETKYPFYDDWRRFDEAWRYLQENQNKTSSKDRFVIDKSSLNEYYQPDKNEYKLDVDTQPIWDDFCRWYFLDRYKTANDKKSIRIKARKTFSLLAESGVQGKVFRAKRKIPTGYAYQALPMDNNVIAGDYANILLEANSKTLSLVPKSGISIEKQLDKKLDVIKKTDVRGLAIDNNSFFNADFDTHGIRLIVENTSVKVGNFPISAIDKSAKRMIFRALFEKEKGKRKKKTTISFKESGPVQDYLKVFLKKIVKIQLRTDGSISNIVVRKNAADFTLSFRSEHIQKLLK

SEQ ID NO: 17 - protein, 1374 aa, Fusobacterium nucleatum
MKKQKFSDYYLGFDIGTNSVGWCVTDLDYNVLRFNKKDMWGSRLFDEAKTAAERRVQRNSRRRLKRRKWRLNLLEEIFSDEIMKIDSNFFRRLKESSLWLEDKNSKEKFTLFNDDNYKDYDFYKQYPTIFHLRDELIKNPEKKDIRLIYLALHSIFKSRGHFLFEGQNLKEIKNFETLYNNLISFLEDNGINKSIDKDNIEKLEKIICDSGKGLKDKEKEFKGIFNSDKQLVAIFKLSVGSSVSLNDLFDTDEYKKEEVEKEKISFREQIYEDDKPIYYSILGEKIELLDIAKSFYDFMVLNNILSDSNYISEAKVKLYEEHKKDLKNLKYIIRKYNKENYDKLFKDKNENNYPAYIGLNKEKDKKEVVEKSRLKIDDLIKVIKGYLPKPERIEEKDKTIFNEILNKIELKTILPKQRISDNGTLPYQIHEVELEKILENQSKYYDFLNYEENGVSTKDKLLKTFKFRIPYYVGPLNSYHKDKGGNSWIVRKEEGKILPWNFEQKVDIEKSAEEFIKRMTNKCTYLNGEDVIPKDSFLYSEYIILNELNKVQVNDEFLNEENKRKIIDELFKENKKVSEKKFKEYLLVNQIANRTVELKGIKDSFNSNYVSYIKFKDIFGEKLNLDIYKEISEKSILWKCLYGDDKKIFEKKIKNEYGDILNKDEIKKINSFKFNTWGRLSEKLLTGIEFINLETGECYSSVMEALRRTNYNLMELLSSKFTLQESIDNENKEMNEVSYRDLIEESYVSPSLKRAILQTLKIYEEIKKITGRVPKKVFIEMARGGDESMKNKKIPARQEQLKKLYDSCGNDIANFSIDIKEMKNSLSSYDNNSLRQKKLYLYYLQFGKCMYTGREIDLDRLLQNNDTYDIDHIYPRSKVIKDDSFDNLVLVLKNENAEKSNEYPVKKEIQEKMKSFWRFLKEKNFISDEKYKRLTGKDDFELRGFMARQLVNVRQTTKEVGKILQQIEPEIKIVYSKAEIASSFREMFDFIKVRELNDTHHAKDAYLNIVAGNVYNTKFTEKPYRYLQEIKENYDVKKIYNYDIKNAWDKENSLEIVKKNMEKNTVNITRFIKEEKGELFNLNPIKKGETSNEIISIKPKLYDGKDNKLNEKYGYYTSLKAAYFIYVEHEKKNKKVKTFERITRIDSTLIKNEKNLIKYLVSQKKLLNPKIIKKIYKEQTLIIDSYPYTFTGVDSNKKVELKNKKQLYLEKKYEQILKNALKFVEDNQGETEENYKFIYLKKRNNNEKNETIDAVKERYNIEFNEMYDKFLEKLSSKDYKNYINNKLYTNFLNSKEKFKKLKLWEKSLILREFLKIFNKNTYGKYEIKDSQTKEKLFSFPEDTGRIRLGQSSLGNNKELLEESVTGLFVKKIKL

SEQ ID NO: 18 - protein, 1084 aa, Corynebacterium diphtheriae
MKYHVGIDVGTFSVGLAAIEVDDAGMPIKTLSLVSHIHDSGLDPDEIKSAVTRLASSGIARRTRRLYRRKRRRLQQLDKFIQRQGWPVIELEDYSDPLYPWKVRAELAASYIADEKERGEKLSVALRHIARHRGWRNPYAKVSSLYLPDGPSDAFKAIREEIKRASGQPVPETATVGQMVTLCELGTLKLRGEGGVLSARLQQSDYAREIQEICRMQEIGQELYRKIIDVVFAAESPKGSASSRVGKDPLQPGKNRALKASDAFQRYRIAALIGNLRVRVDGEKRILSVEEKNLVFDHLVNLTPKKEPEWVTIAEILGIDRGQLIGTATMTDDGERAGARPPTHDTNRSIVNSRIAPLVDWWKTASALEQHAMVKALSNAEVDDFDSPEGAKVQAFFADLDDDVHAKLDSLHLPVGRAAYSEDTLVRLTRRMLSDGVDLYTARLQEFGIEPSWTPPTPRIGEPVGNPAVDRVLKTVSRWLESATKTWGAPERVIIEHVREGFVTEKRAREMDGDMRRRAARNAKLFQEMQEKLNVQGKPSRADLWRYQSVQRQNCQCAYCGSPITFSNSEMDHIVPRAGQGSTNTRENLVAVCHRCNQSKGNTPFAIWAKNTSIEGVSVKEAVERTRHWVTDTGMRSTDFKKFTKAVVERFQRATMDEEIDARSMESVAWMANELRSRVAQHFASHGTTVRVYRGSLTAEARRASGISGKLKFFDGVGKSRLDRRHHAIDAAVIAFTSDYVAETLAVRSNLKQSQAHRQEAPQWREFTGKDAEHRAAWRVWCQKMEKLSALLTEDLRDDRVVVMSNVRLRLGNGSAHKETIGKLSKVKLSSQLSVSDIDKASSEALWCALTREPGFDPKEGLPANPERHIRVNGTHVYAGDNIGLFPVSAGSIALRGGYAELGSSFHHARVYKITSGKKPAFAMLRVYTIDLLPYRNQDLFSVELKPQTMSMRQAEKKLRDALATGNAEYLGWLVVDDELVVDTSKIATDQVKAVEAELGTIRRWRVDGFFSPSKLRLRPLQMSKEGIKKESAPELSKIIDRPGWLPAVNKLFSDGNVTVVRRDSLGRVRLESTAHLPVTWKVQ

SEQ ID NO: 19 - protein, 1395 aa, Treponema denticola
MKKEIKDYFLGLDVGTGSVGWAVTDTDYKLLKANRKDLWGMRCFETAETAEVRRLHRGARRRIERRKKRIKLLQELFSQEIAKTDEGFFQRMKESPFYAEDKTILQENTLFNDKDFADKTYHKAYPTINHLIKAWIENKVKPDPRLLYLACHNIIKKRGHFLFEGDFDSENQFDTSIQALFEYLREDMEVDIDADSQKVKEILKDSSLKNSEKQSRLNKILGLKPSDKQKKAITNLISGNKINFADLYDNPDLKDAEKNSISFSKDDFDALSDDLASILGDSFELLLKAKAVYNCSVLSKVIGDEQYLSFAKVKIYEKHKTDLTKLKNVIKKHFPKDYKKVFGYNKNEKNNNNYSGYVGVCKTKSKKLIINNSVNQEDFYKFLKTILSAKSEIKEVNDILTEIETGTFLPKQISKSNAEIPYQLRKMELEKILSNAEKHFSFLKQKDEKGLSHSEKIIMLLTFKIPYYIGPINDNHKKFFPDRCWVVKKEKSPSGKTTPWNFFDHIDKEKTAEAFITSRTNFCTYLVGESVLPKSSLLYSEYTVLNEINNLQIIIDGKNICDIKLKQKIYEDLFKKYKKITQKQISTFIKHEGICNKTDEVIILGIDKECTSSLKSYIELKNIFGKQVDEISTKNMLEEIIRWATIYDEGEGKTILKTKIKAEYGKYCSDEQIKKILNLKFSGWGRLSRKFLETVTSEMPGFSEPVNIITAMRETQNNLMELLSSEFTFTENIKKINSGFEDAEKQFSYDGLVKPLFLSPSVKKMLWQTLKLVKEISHITQAPPKKIFIEMAKGAELEPARTKTRLKILQDLYNNCKNDADAFSSEIKDLSGKIENEDNLRLRSDKLYLYYTQLGKCMYCGKPIEIGHVFDTSNYDIDHIYPQSKIKDDSISNRVLVCSSCNKNKEDKYPLKSEIQSKQRGFWNFLQRNNFISLEKLNRLTRATPISDDETAKFIARQLVETRQATKVAAKVLEKMFPETKIVYSKAETVSMFRNKFDIVKCREINDFHHAHDAYLNIVVGNVYNTKFTNNPWNFIKEKRDNPKIADTYNYYKVFDYDVKRNNITAWEKGKTIITVKDMLKRNTPIYTRQAACKKGELFNQTIMKKGLGQHPLKKEGPFSNISKYGGYNKVSAAYYTLIEYEEKGNKIRSLETIPLYLVKDIQKDQDVLKSYLTDLLGKKEFKILVPKIKINSLLKINGFPCHITGKTNDSFLLRPAVQFCCSNNEVLYFKKIIRFSEIRSQREKIGKTISPYEDLSFRSYIKENLWKKTKNDEIGEKEFYDLLQKKNLEIYDMLLTKHKDTIYKKRPNSATIDILVKGKEKFKSLIIENQFEVILEILKLFSATRNVSDLQHIGGSKYSGVAKIGNKISSLDNCILIYQSITGIFEKRIDLLKV

SEQ ID NO: 20 - protein, 1334 aa, Listeria monocytogenes
MKNPYTIGLDIGTNSVGWAVLTNQYDLVKRKMKVAGNSDKKQIKKNFWGVRLFDDGQTAVDRRMNRTARRRIERRRNRISYLQEIFAVEMANIDANFFCRLNDSFYVDSEKRNSRHPFFATIEEEVAYHDNYRTIYHLREKLVNSSEKADLRLVYLALAHIIKYRGNFLIEGALDTKNTSVDEVYKQFIETYNQVFMSNIEEGALAKVEENIEVANILAGKFTRREKFERILQLYPGEKSTGMFAQFISLIVGSKGNFQKVFDLIEKTDIECAKDSYEEDLETLLAIIGDEYAELFVAAKNTYNAVVLSSIITVTDTETNAKLSASMIERFDAHEKDLVELKAFIKLNLPKQYEEIFSNAAIDGYAGYIDGKTKQVDFYKYLKTILENIEGSDYFIAKIEEENFLRKQRTFDNGAIPHQLHLEELEAIIHQQAKYYPFLKEDYDKIKSLVTFRIPYFVGPLANGQSEFAWLTRKADGEIRPWNIEEKVDFGKSAVDFIEKMTNKDTYLPKENVLPKHSLCYQKYMVYNELTKIRYIDDQGKTNYFSGREKQQVFNDLFKQKRKVKKKDLELFLRNINHIESPTIEGLEDSFNASYATYHDLLKVGMKQEILDNPLNTEMLEDIVKILTVFEDKPMIKEQLQQFSDVLDGGVLKKLERRHYTGWGRLSAKLLVGIREKQSHLTILDYLMNDDGLNRNLMQLINDSNLSFKSIIEKEQVSTTDKDLQSIVAELAGSPAIKKGILQSLKIVDELVSIMGYPPQTIVVEMARENQTTGKGKNNSKPRYKSLEKAIKEFGSQILKEHPTDNQELKNNRLYLYYLQNGKDMYTGQELDIHNLSNYDIDHIVPQSFITDNSIDNLVLTSSAGNREKGGDVPPLEIVRKRKVFWEKLYQGNLMSKRKFDYLTKAERGGLTEADKARFIHRQLVETRQITKNVANILYQRFNKETDNHGNTMEQVRIVTLKSALVSQFRKQFQLYKVREVNGYHHAHDAYLNGVVANTLLKVYPQLEPEFVYGEYHQFDWFKANKATAKKQFYTNIMLFFAQKERIIDENGEILWDKKYLETIKKVLDYRQMNIVKKTEIQKGEFSKATIKPKGNSSKLIPRKENWDPMKYGGLDSPNMAYAVIIEHAKGKKKIVIEKKLIQINIMERKMFEKDEEAFLEEKGYRHPKVLTKLPKYTLYECEKGRRRMLASANEAQKGNQLVLSNHLVSLLYHAKNCEASDGKSLKYIEAHRETFSELLAQVSEFATRYTLADANLSKINNLFEQNKEGDIKAIAQSFVDLMAFNAMGAPASFKFFEATIDRKRYTNLKELLSSTIIYQSITGLYESRKRLDD

SEQ ID NO: 21 - protein, 1236 aa, Mycoplasma mobile
MYFYKNKENKLNKKVVLGLDLGIASVGWCLTDISQKEDNKFPIILHGVRLFETVDDSDDKLLNETRRKKRGQRRRNRRLFTRKRDFIKYLIDNNIIELEFDKNPKILVRNFIEKYINPFSKNLELKYKSVTNLPIGFHNLRKAAINEKYKLDKSELIVLLYFYLSLRGAFFDNPEDTKSKEMNKNEIEIFDKNESIKNAEFPIDKIIEFYKISGKIRSTINLKFGHQDYLKEIKQVFEKQNIDFMNYEKFAMEEKSFFSRIRNYSEGPGNEKSFSKYGLYANENGNPELIINEKGQKIYTKIFKTLWESKIGKCSYDKKLYRAPKNSFSAKVFDITNKLTDWKHKNEYISERLKRKILLSRFLNKDSKSAVEKILKEENIKFENLSEIAYNKDDNKINLPIINAYHSLTTIFKKHLINFENYLISNENDLSKLMSFYKQQSEKLFVPNEKGSYEINQNNNVLHIFDAISNILNKFSTIQDRIRILEGYFEFSNLKKDVKSSEIYSEIAKLREFSGTSSLSFGAYYKFIPNLISEGSKNYSTISYEEKALQNQKNNFSHSNLFEKTWVEDLIASPTVKRSLRQTMNLLKEIFKYSEKNNLEIEKIVVEVTRSSNNKHERKKIEGINKYRKEKYEELKKVYDLPNENTTLLKKLWLLRQQQGYDAYSLRKIEANDVINKPWNYDIDHIVPRSISFDDSFSNLVIVNKLDNAKKSNDLSAKQFIEKIYGIEKLKEAKENWGNWYLRNANGKAFNDKGKFIKLYTIDNLDEFDNSDFINRNLSDTSYITNALVNHLTFSNSKYKYSVVSVNGKQTSNLRNQIAFVGIKNNKETEREWKRPEGFKSINSNDFLIREEGKNDVKDDVLIKDRSFNGHHAEDAYFITIISQYFRSFKRIERLNVNYRKETRELDDLEKNNIKFKEKASFDNFLLINALDELNEKLNQMRFSRMVITKKNTQLFNETLYSGKYDKGKNTIKKVEKLNLLDNRTDKIKKIEEFFDEDKLKENELTKLHIFNHDKNLYETLKIIWNEVKIEIKNKNLNEKNYFKYFVNKKLQEGKISFNEWVPILDNDFKIIRKIRYIKFSSEEKETDEIIFSQSNFLKIDQRQNFSFHNTLYWVQIWVYKNQKDQYCFISIDARNSKFEKDEIKINYEKLKTQKEKLQIINEEPILKINKGDLFENEEKELFYIVGRDEKPQKLEIKYILGKKIKDQKQIQKPVKKYFPNWKKVNLTYMGEIFKK

SEQ ID NO: 22 - protein, 1372 aa, Legionella pneumophila
MESSQILSPIGIDLGGKFTGVCLSHLEAFAELPNHANTKYSVILIDHNNFQLSQAQRRATRHRVRNKKRNQFVKRVALQLFQHILSRDLNAKEETALCHYLNNRGYTYVDTDLDEYIKDETTINLLKELLPSESEHNFIDWFLQKMQSSEFRKILVSKVEEKKDDKELKNAVKNIKNFITGFEKNSVEGHRHRKVYFENIKSDITKDNQLDSIKKKIPSVCLSNLLGHLSNLQWKNLHRYLAKNPKQFDEQTFGNEFLRMLKNFRHLKGSQESLAVRNLIQQLEQSQDYISILEKTPPEITIPPYEARTNTGMEKDQSLLLNPEKLNNLYPNWRNLIPGIIDAHPFLEKDLEHTKLRDRKRIISPSKQDEKRDSYILQRYLDLNKKIDKFKIKKQLSFLGQGKQLPANLIETQKEMETHFNSSLVSVLIQIASAYNKEREDAAQGIWFDNAFSLCELSNINPPRKQKILPLLVGAILSEDFINNKDKWAKFKIFWNTHKIGRTSLKSKCKEIEEARKNSGNAFKIDYEEALNHPEHSNNKALIKIIQTIPDIIQAIQSHLGHNDSQALIYHNPFSLSQLYTILETKRDGFHKNCVAVTCENYWRSQKTEIDPEISYASRLPADSVRPFDGVLARMMQRLAYEIAMAKWEQIKHIPDNSSLLIPIYLEQNRFEFEESFKKIKGSSSDKTLEQAIEKQNIQWEEKFQRIINASMNICPYKGASIGGQGEIDHIYPRSLSKKHFGVIFNSEVNLIYCSSQGNREKKEEHYLLEHLSPLYLKHQFGTDNVSDIKNFISQNVANIKKYISFHLLTPEQQKAARHALFLDYDDEAFKTITKFLMSQQKARVNGTQKFLGKQIMEFLSTLADSKQLQLEFSIKQITAEEVHDHRELLSKQEPKLVKSRQQSFPSHAIDATLTMSIGLKEFPQFSQELDNSWFINHLMPDEVHLNPVRSKEKYNKPNISSTPLFKDSLYAERFIPVWVKGETFAIGFSEKDLFEIKPSNKEKLFTLLKTYSTKNPGESLQELQAKSKAKWLYFPINKTLALEFLHHYFHKEIVTPDDTTVCHFINSLRYYTKKESITVKILKEPMPVLSVKFESSKKNVLGSFKHTIALPATKDWERLFNHPNFLALKANPAPNPKEFNEFIRKYFLSDNNPNSDIPNNGHNIKPQKHKAVRKVFSLPVIPGNAGTMMRIRRKDNKGQPLYQLQTIDDTPSMGIQINEDRLVKQEVLMDAYKTRNLSTIDGINNSEGQAYATFDNWLTLPVSTFKPEIIKLEMKPHSKTRRYIRITQSLADFIKTIDEALMIKPSDSIDDPLNMPNEIVCKNKLFGNELKPRDGKMKIVSTGKIVTYEFESDSTPQWIQTLYVTQLKKQP

SEQ ID NO: 23 - protein, 1122 aa, Streptococcus thermophilus
MSDLVLGLDIGIGSVGVGILNKVTGEIIHKNSRIFPAAQAENNLVRRTNRQGRRLTRRKKHRIVRLNRLFEESGLITDFTKISINLNPYQLRVKGLTDELSNEELFIALKNMVKHRGISYLDDASDDGNSSVGDYAQIVKENSKQLETKTPGQIQLERYQTYGQLRGDFTVEKDGKKHRLINVFPTSAYRSEALRILQTQQEFNSQITDEFINRYLEILTGKRKYYHGPGNEKSRTDYGRYRTNGETLDNIFGILIGKCTFYPDEFRAAKASYTAQEFNLLNDLNNLTVPTETKKLSKEQKNQIINYVKNEKVMGPAKLFKYIAKLLSCDVADIKGHRIDKSGKAEIHTFEAYRKMKTLETLDIEQMDRETLDKLAYVLTLNTEREGIQEALEHEFADGSFSQKQVDELVQFRKANSSIFGKGWHNFSVKLMMELIPELYETSEEQMTILTRLGKQKTTSSSNKTKYIDEKLLTEEIYNPVVAKSVRQAIKIVNAAIKEYGDFDNIVIEMARETNEDDEKKAIQKIQKANKDEKDAAMLKAANQYNGKAELPHSVFHGHKQLATKIRLWHQQGERCLYTGKTISIHDLINNPNQFEVDHILPLSITFDDSLANKVLVYATANQEKGQRTPYQALDSMDDAWSFRELKAFVRESKTLSNKKKEYLLTEEDISKFDVRKKFIERNLVDTRYASRVVLNALQEHFRAHKIDTKVSVVRGQFTSQLRRHWGIEKTRDTYHHHAVDALIIAASSQLNLWKKQKNTLVSYSEEQLLDIETGELISDDEYKESVFKAPYQHFVDTLKSKEFEDSILFSYQVDSKFNRKISDATIYATRQAKVGKDKKDETYVLGKIKDIYTQDGYDAFMKIYKKDKSKFLMYRHDPQTFEKVIEPILENYPNKEMNEKGKEVPCNPFLKYKEEHGYIRKYSKKGNGPEIKSLKYYDSKLLGNPIDITPENSKNKVVLQSLKPWRTDVYFNKNTGKYEILGLKYADLQFEKKTGTYKISQEKYNGIMKEEGVDSDSEFKFTLYKNDLLLVKDTETKEQQLFRFLSRTMPNVKYYVELKPYSKDKFEKNESLIEILGSADKSGRCIKGLGKSNISIYKVRTDVLGNQHIIKNEGDKPKLDF

SEQ ID NO: 24 - protein, 1128 aa, Streptococcus thermophilus
MSDLVLGLDIGIGSVGVGILNKVTGEIIHKNSRIFPAAQAENNLVRRTNRQGRRLTRRKKHRIVRLNRLFEESGLITDFTKISINLNPYQLRVKGLTDELSNEELFIALKNMVKHRGISYLDDASDDGNSSVGDYAQIVKENSKQLETKTPGQIQLERYQTYGQLRGDFTVEKDGKKHRLINVFPTSAYRSEALRILQTQQEFNPQITDEFINRYLEILTGKRKYYHGPGNEKSRTDYGRYRTSGETLDNIFGILIGKCTFYPEEFRAAKASYTAQEFNLLNDLNNLTVPTETKKLSKEQKNQIINYVKNEKAMGPAKLFKYIAKLLSCDVADIKGYRIDKSGKAEIHTFEAYRKMKTLETLDIEQMDRETLDKLAYVLTLNTEREGIQEALEHEFADGSFSQKQVDELVQFRKANSSIFGKGWHNFSVKLMMELIPELYETSEEQMTILTRLGKQKRLRLQIKQNISNKTKYIDEKLLTEEIYNPVVAKSVRQAIKIVNAAIKEYGDFDNIVIEMARETNEDDEKKAIQKIQKANKDEKDAAMLKAANQYNGKAELPHSVFHGHKQLATKIRLWHQQGERCLYTGKTISIHDLINNPNQFEVDHILPLSITFDDSLANKVLVYATANQEKGQRTPYQALDSMDDAWSFRELKAFVRESKTLSNKKKEYLLTEEDISKFDVRKKFIERNLVDTRYASRVVLNALQEHFRAHKIDTKVSVVRGQFTSQLRRHWGIEKTRDTYHHHAVDALIIAASSQLNLWKKQKNTLVSYSEEQLLDIETGELISDDEYKESVFKAPYQHFVDTLKSKEFEDSILFSYQVDSKFNRKISDATIYATRQAKVGKDKKDETYVLGKIKDIYTQDGYDAFMKIYKKDKSKFLMYRHDPQTFEKVIEPILENYPNKQMNEKGKEVPCNPFLKYKEEHGYIRKYSKKGNGPEIKSLKYYDSKLLGNPIDITPENSKNKVVLQSLKPWRTDVYFNKATGKYEILGLKYADLQFEKGTGTYKISQEKYNDIKKKEGVDSDSEFKFTLYKNDLLLVKDTETKEQQLFRFLSRTLPKQKHYVELKPYDKQKFEGGEALIKVLGNVANGGQCIKGLAKSNISIYKVRTDVLGNQHIIKNEGDKPKLDF

SEQ ID NO: 25 - protein, 1123 aa, Francisella tularensis
MNVKILPIAIDLDVKNTGVFSAFYQKGTSLEKLDNKNGKVYELSKDSYTLLMNNRTARRHKRRGIDRKQLVKRLFKLVWTEQLNLEWDKDTQQAISFLFNRRGFSFITDGYSTEYLNIVPEQVKAILMDIFDDYNGEDDLDSYLKLATEQESKISEIYNKLMQKILEFKLRKLCTDIKDDKVSTKTLKEITSYEFELLADYLANYSESLKTQKFSYTDKQGNLKELSYYHHDKYNIQEFLKRHATINDEILGTLLTDDFDIWNFNFEKFDFDKNEEKLQNQEDKDHTQAHLHHFVFVVNKIKSEMASGGRHRSQYFQEITNVLDENNHQEGYLKNFCENLHNKKYSNLSVKNLVNLVGNLSNLELKPLRKYFNDKIHAKADHWDEQKFTETYCHWILGEWRVGVKDQDKKDGAKYSYKDLCNELKQKVTKAGLIDFLLELDPCRTIPPYLDNNNRKPPKCQSLILNPKFLDNQYPNWQQYLQELKKLQSIQDYLDSFETDLKDLKSSKDQPYFVEYKSSNQQMASGQRDYKDLDARILQFIFDRVKASDELLLNEIYFQAKKLKQKASSELEKLESSKKLDEVIANSQLSQILKSQHTNGIFEQGTFLHLVCKYYKQRQRARDSRLYIMPEYRYDKKLDKYNNTGRFDDNNQLLTYCNHKPRQKRYQLLNDLAGVLQVSRNQLLSSVEEWFQQAQRVGEISKSQDEQIFEWLKSFKIASYCKAAVEMQKQYRGTLKNAIQTAIFRQSENINKNKNTGNQQQALSENSKDVKSLTADEKKLLKLIENIAKASQKIGESLGLNDKQIKKFNSIYSFAQIQQIAFAKRKGNANTCAVCSADNAHRMQQIKITELVEDNKDNIILSAKAQRLPAIPTRIVDGAVKKMATILAKNIVDDNWQNIKQVLSAKHQLHIPIITESNAFEFEPALADVKGKSLKDRRKKALERISPENIFKDKNNRIKEFAKGISAYSGANLTDGDFDGAKEELDHIIPRSHKKYGTLNDEANLICVTRDDNKNIFAIDTSKWFEIETPSDLRDIGVATIQYKIDNNSRPKVRVKLDYVIDDDSKINYFMNHSLLKSRYPDKVLEILKQSTIIEFESSGFNKTIKEMLGMTLAGIYNETSNN

SEQ ID NO: 26 - protein, 1436 aa, Bacteroides fragilis
MKRILGLDLGTNSIGWALVNEAENKDERSSIVKLGVRVNPLTVDELTNFEKGKSITTNADRTLKRGMRRNLQRYKLRRETLTEVLKEHKLITEDTILSENGNRTTFETYRLRAKAVTEEISLEEFARVLLMINKKRGYKSSRKAKGVEEGTLIDGMDIARELYNNNLTPGELCLQLLDAGKKFLPDFYRSDLQNELDRIWEKQKEYYPEILTDVLKEELRGKKRDAVWAICAKYFVWKENYTEWNKEKGKTEQQEREHKLEGIYSKRKRDEAKRENLQWRVNGLKEKLSLEQLVIVFQEMNTQINNSSGYLGAISDRSKELYFNKQTVGQYQMEMLDKNPNASLRNMVFYRQDYLDEFNMLWEKQAVYHKELTEELKKEIRDIIIFYQRRLKSQKGLIGFCEFESRQIEVDIDGKKKIKTVGNRVISRSSPLFQEFKIWQILNNIEVTVVGKKRKRRKLKENYSALFEELNDAEQLELNGSRRLCQEEKELLAQELFIRDKMTKSEVLKLLFDNPQELDLNFKTIDGNKTGYALFQAYSKMIEMSGHEPVDFKKPVEKVVEYIKAVFDLLNWNTDILGFNSNEELDNQPYYKLWHLLYSFEGDNTPTGNGRLIQKMTELYGFEKEYATILANVSFQDDYGSLSAKAIHKILPHLKEGNRYDVACVYAGYRHSESSLTREEIANKVLKDRLMLLPKNSLHNPVVEKILNQMVNVINVIIDIYGKPDEIRVELARELKKNAKEREELTKSIAQTTKAHEEYKTLLQTEFGLTNVSRTDILRYKLYKELESCGYKTLYSNTYISREKLFSKEFDIEHIIPQARLFDDSFSNKTLEARSVNIEKGNKTAYDFVKEKFGESGADNSLEHYLNNIEDLFKSGKISKTKYNKLKMAEQDIPDGFIERDLRNTQYIAKKALSMLNEISHRVVATSGSVTDKLREDWQLIDVMKELNWEKYKALGLVEYFEDRDGRQIGRIKDWTKRNDHRHHAMDALTVAFTKDVFIQYFNNKNASLDPNANEHAIKNKYFQNGRAIAPMPLREFRAEAKKHLENTLISIKAKNKVITGNINKTRKKGGVNKNMQQTPRGQLHLETIYGSGKQYLTKEEKVNASFDMRKIGTVSKSAYRDALLKRLYENDNDPKKAFAGKNSLDKQPIWLDKEQMRKVPEKVKIVTLEAIYTIRKEISPDLKVDKVIDVGVRKILIDRLNEYGNDAKKAFSNLDKNPIWLNKEKGISIKRVTISGISNAQSLHVKKDKDGKPILDENGRNIPVDFVNTGNNHHVAVYYRPVIDKRGQLVVDEAGNPKYELEEVVVSFFEAVTRANLGLPIIDKDYKTTEGWQFLFSMKQNEYFVFPNEKTGFNPKEIDLLDVENYGLISPNLFRVQKFSLKNYVFRHHLETTIKDTSSILRGITWIDFRSSKGLDTIVKVRVNHIGQIVSVGEY

SEQ ID NO: 27 - protein, 1314 aa, Mycoplasma synoviae
MLRLYCANNLVLNNVQNLWKYLLLLIFDKKIIFLFKIKVILIRRYMENNNKEKIVIGFDLGVASVGWSIVNAETKEVIDLGVRLFSEPEKADYRRAKRTTRRLLRRKKFKREKFHKLILKNAEIFGLQSRNEILNVYKDQSSKYRNILKLKINALKEEIKPSELVWILRDYLQNRGYFYKNEKLTDEFVSNSFPSKKLHEHYEKYGFFRGSVKLDNKLDNKKDKAKEKDEEEESDAKKESEELIFSNKQWINEIVKVFENQSYLTESFKEEYLKLFNYVRPFNKGPGSKNSRTAYGVFSTDIDPETNKFKDYSNIWDKTIGKCSLFEEEIRAPKNLPSALIFNLQNEICTIKNEFTEFKNWWLNAEQKSEILKFVFTELFNWKDKKYSDKKFNKNLQDKIKKYLLNFALENFNLNEEILKNRDLENDTVLGLKGVKYYEKSNATADAALEFSSLKPLYVFIKFLKEKKLDLNYLLGLENTEILYFLDSIYLAISYSSDLKERNEWFKKLLKELYPKIKNNNLEIIENVEDIFEITDQEKFESFSKTHSLSREAFNHIIPLLLSNNEGKNYESLKHSNEELKKRTEKAELKAQQNQKYLKDNFLKEALVPLSVKTSVLQAIKIFNQIIKNFGKKYEISQVVIEMARELTKPNLEKLLNNATNSNIKILKEKLDQTEKFDDFTKKKFIDKIENSVVFRNKLFLWFEQDRKDPYTQLDIKINEIEDETEIDHVIPYSKSADDSWFNKLLVKKSTNQLKKNKTVWEYYQNESDPEAKWNKFVAWAKRIYLVQKSDKESKDNSEKNSIFKNKKPNLKFKNITKKLFDPYKDLGFLARNLNDTRYATKVFRDQLNNYSKHHSKDDENKLFKVVCMNGSITSFLRKSMWRKNEEQVYRFNFWKKDRDQFFHHAVDASIIAIFSLLTKTLYNKLRVYESYDVQRREDGVYLINKETGEVKKADKDYWKDQHNFLKIRENAIEIKNVLNNVDFQNQVRYSRKANTKLNTQLFNETLYGVKEFENNFYKLEKVNLFSRKDLRKFILEDLNEESEKNKKNENGSRKRILTEKYIVDEILQILENEEFKDSKSDINALNKYMDSLPSKFSEFFSQDFINKCKKENSLILTFDAIKHNDPKKVIKIKNLKFFREDATLKNKQAVHKDSKNQIKSFYESYKCVGFIWLKNKNDLEESIFVPINSRVIHFGDKDKDIFDFDSYNKEKLLNEINLKRPENKKFNSINEIEFVKFVKPGALLLNFENQQIYYISTLESSSLRAKIKLLNKMDKGKAVSMKKITNPDEYKIIEHVNPLGINLNWTKKLENNN

SEQ ID NO: 28 - protein, 1368 aa, Streptococcus pyogenes
MDKKYSIGLDIGTNSVGWAVITDDYKVPSKKFKVLGNTDRHSIKKNLIGALLFDSGETAEATRLKRTARRRYTRRKNRICYLQEIFSNEMAKVDDSFFHRLEESFLVEEDKKHERHPIFGNIVDEVAYHEKYPTIYHLRKKLVDSTDKADLRLIYLALAHMIKFRGHFLIEGDLNPDNSDVDKLFIQLVQTYNQLFEENPINASGVDAKAILSARLSKSRRLENLIAQLPGEKKNGLFGNLIALSLGLTPNFKSNFDLAEDAKLQLSKDTYDDDLDNLLAQIGDQYADLFLAAKNLSDAILLSDILRLNSEITKAPLSASMIKRYDEHHQDLTLLKALVRQQLPEKYKEIFFDQSKNGYAGYIDGGASQEEFYKFIKPILEKMDGTEELLAKLNREDLLRKQRTFDNGSIPHQIHLGELHAILRRQEDFYPFLKDNREKIEKILTFRIPYYVGPLARGNSRFAWMTRKSEETITPWNFEEVVDKGASAQSFIERMTNFDKNLPNEKVLPKHSLLYEYFTVYNELTKVKYVTEGMRKPAFLSGEQKKAIVDLLFKTNRKVTVKQLKEDYFKKIECFDSVEISGVEDRFNASLGTYHDLLKIIKDKDFLDNEENEDILEDIVLTLTLFEDREMIEERLKTYAHLFDDKVMKQLKRRRYTGWGRLSRKLINGIRDKQSGKTILDFLKSDGFANRNFMQLIHDDSLTFKEDIQKAQVSGQGDSLHEHIANLAGSPAIKKGILQTVKVVDELVKVMGRHKPENIVIEMARENQTTQKGQKNSRERMKRIEEGIKELGSQILKEHPVENTQLQNEKLYLYYLQNGRDMYVDQELDINRLSDYDVDHIVPQSFIKDDSIDNKVLTRSDKNRGKSNNVPSEEVVKKMKNYWRQLLNAKLITQRKFDNLTKAERGGLSELDKAGFIKRQLVETRQITKHVAQILDSRMNTKYDENDKLIREVKVITLKSKLVSDFRKDFQFYKVREINNYHHAHDAYLNAVVGTALIKKYPKLESEFVYGDYKVYDVRKMIAKSEQEIGKATAKYFFYSNIMNFFKTEITLANGEIRKRPLIETNGETGEIVWDKGRDFATVRKVLSMPQVNIVKKTEVQTGGFSKESILPKRNSDKLIARKKDWDPKKYGGFDSPTVAYSVLVVAKVEKGKSKKLKSVKELLGITIMERSSFEKNPIDFLEAKGYKEVRKDLIVKLPKYSLFELENGRKRMLASAGELQKGNELALPSKYVNFLYLASHYEKLKGSPEDNEQKQLFVEQHKHYLDEIIEQISEFSKRVILADANLDKVLSAYNKHRDKPIREQAENIIHLFTLTNLGAPAAFKYFDTTIDRKRYTSTKEVLDATFIHQSITGLYETRIDLSQLGGD

SEQ ID NO: 29 - protein, 1368 aa, Streptococcus pyogenes
MDKKYSIGLDIGTNSVGWAVITDDYKVPSKKFKVLGNTDRHSIKKNLIGALLFDSGETAEATRLKRTARRRYTRRKNRICYLQEIFSNEMAKVDDSFFHRLEESFLVEEDKKHERHPIFGNIVDEVAYHEKYPTIYHLRKKLVDSTDKADLRLIYLALAHMIKFRGHFLIEGDLNPDNSDVDKLFIQLVQTYNQLFEENPINASGVDAKAILSARLSKSRRLENLIAQLPGEKKNGLFGNLIALSLGLTPNFKSNFDLAEDAKLQLSKDTYDDDLDNLLAQIGDQYADLFLAAKNLSDAILLSDILRVNTEITKAPLSASMIKRYDEHHQDLTLLKALVRQQLPEKYKEIFFDQSKNGYAGYIDGGASQEEFYKFIKPILEKMDGTEELLVKLNREDLLRKQRTFDNGSIPHQIHLGELHAILRRQEDFYPFLKDNREKIEKILTFRIPYYVGPLARGNSRFAWMTRKSEETITPWNFEEVVDKGASAQSFIERMTNFDKNLPNEKVLPKHSLLYEYFTVYNELTKVKYVTEGMRKPAFLSGEQKKAIVDLLFKTNRKVTVKQLKEDYFKKIECFDSVEISGVEDRFNASLGTYHDLLKIIKDKDFLDNEENEDILEDIVLTLTLFEDREMIEERLKTYAHLFDDKVMKQLKRRRYTGWGRLSRKLINGIRDKQSGKTILDFLKSDGFANRNFMQLIHDDSLTFKEDIQKAQVSGQGDSLHEHIANLAGSPAIKKGILQTVKVVDELVKVMGRHKPENIVIEMARENQTTQKGQKNSRERMKRIEEGIKELGSQILKEHPVENTQLQNEKLYLYYLQNGRDMYVDQELDINRLSDYDVDHIVPQSFLKDDSIDNKVLTRSDKNRGKSDNVPSEEVVKKMKNYWRQLLNAKLITQRKFDNLTKAERGGLSELDKAGFIKRQLVETRQITKHVAQILDSRMNTKYDENDKLIREVKVITLKSKLVSDFRKDFQFYKVREINNYHHAHDAYLNAVVGTALIKKYPKLESEFVYGDYKVYDVRKMIAKSEQEIGKATAKYFFYSNIMNFFKTEITLANGEIRKRPLIETNGETGEIVWDKGRDFATVRKVLSMPQVNIVKKTEVQTGGFSKESILPKRNSDKLIARKKDWDPKKYGGFDSPTVAYSVLVVAKVEKGKSKKLKSVKELLGITIMERSSFEKNPIDFLEAKGYKEVKKDLIIKLPKYSLFELENGRKRMLASAGELQKGNELALPSKYVNFLYLASHYEKLKGSPEDNEQKQLFVEQHKHYLDEIIEQISEFSKRVILADANLDKVLSAYNKHRDKPIREQAENIIHLFTLTNLGAPAAFKYFDTTIDRKRYTSTKEVLDATLIHQSITGLYETRIDLSQLGGD

SEQ ID NO: 30 - protein, 1370 aa, Streptococcus agalactiae; identical to SEQ ID NO: 11

SEQ ID NO: 31 - protein, 1173 aa, Rhodospirillum rubrum
MRPIEPWILGLDIGTDSLGWAVFSCEEKGPPTAKELLGGGVRLFDSGRDAKDHTSRQAERGAFRRARRQTRTWPWRRDRLIALFQAAGLTPPAAETRQIALALRREAVSRPLAPDALWAALLHLAHHRGFRSNRIDKRERAAAKALAKAKPAKATAKATAPAKEADDEAGFWEGAEAALRQRMAASGAPTVGALLADDLDRGQPVRMRYNQSDRDGVVAPTRALIAEELAEIVARQSSAYPGLDWPAVTRLVLDQRPLRSKGAGPCAFLPGEDRALRALPTVQDFIIRQTLANLRLPSTSADEPRPLTDEEHAKALALLSTARFVEWPALRRALGLKRGVKFTAETERNGAKQAARGTAGNLTEAILAPLIPGWSGWDLDRKDRVFSDLWAARQDRSALLALIGDPRGPTRVTEDETAEAVADAIQIVLPTGRASLSAKAARAIAQAMAPGIGYDEAVTLALGLHHSHRPRQERLARLPYYAAALPDVGLDGDPVGPPPAEDDGAAAEAYYGRIGNISVHIALNETRKIVNALLHRHGPILRLVMVETTRELKAGADERKRMIAEQAERERENAEIDVELRKSDRWMANARERRQRVRLARRQNNLCPYTSTPIGHADLLGDAYDIDHVIPLARGGRDSLDNMVLCQSDANKTKGDKTPWEAFHDKPGWIAQRDDFLARLDPQTAKALAWRFADDAGERVARKSAEDEDQGFLPRQLTDTGYIARVALRYLSLVTNEPNAVVATNGRLTGLLRLAWDITPGPAPRDLLPTPRDALRDDTAARRFLDGLTPPPLAKAVEGAVQARLAALGRSRVADAGLADALGLTLASLGGGGKNRADHRHHFIDAAMIAVTTRGLINQINQASGAGRILDLRKWPRTNFEPPYPTFRAEVMKQWDHIHPSIRPAHRDGGSLHAATVFGVRNRPDARVLVQRKPVEKLFLDANAKPLPADKIAEIIDGFASPRMAKRFKALLARYQAAHPEVPPALAALAVARDPAFGPRGMTANTVIAGRSDGDGEDAGLITPFRANPKAAVRTMGNAVYEVWEIQVKGRPRWTHRVLTRFDRTQPAPPPPPENARLVMRLRRGDLVYWPLESGDRLFLVKKMAVDGRLALWPARLATGKATALYAQLSCPNINLNGDQGYCVQSAEGIRKEKIRTTSCTALGRLRLSKKAT

SEQ ID NO: 32 - protein, 997 aa, Maritimibacter alkaliphilus
MKVLVDAGLMPSDPAAAKALETLDPYELRATGLDVMLPLTHLGRAVFHLNQRRGFKSNRKTDRGDNESGKIKDATKRLTWAMQEAGARTYGEFLHMRRARASDPRQVPSVRTRLSVASRGGPDSKEEAGYDFYPERAHLEDEFHALWSAQAAFHPDLTCELRDVVFEKIFYQRPLKEPKVGLCLFTAEERLPKAHPLTGRRVLYETVNQLRVTADGRTTRPLTLEERDMIVYALDNKKPVKSLSSMHLKLVALGKLVKLKDGERFTLESGVRDAIACDPIRATMGHPDGFGPAWSRLDWQAQWALIEKLRQVQSDDDFASLVAWLGATHNLSEDHAKRVANLHLPEGYGRLGLTATEAILCNLKAEVCTYSQAVERWGKHHSNQRTGECLEALPYYGEVLDRHVIPGTYNEDDDDVTRYGRITNPTVHIGLNQLRRLVNRIIATYGKPDQIVVELARELKQSEAQKSEALKKIRDTTADAIRRGRQLEEIGQKNTGANRLLLRLWEDLGPAVGPRCCPYTGKPISVTMLFDGACDVDHILPYSRTLDDSFANRTICLREANRQKGDRTPWEAWGGSDQWDAIEANLKDLPENKRKRFAPDAMERFEGERDFLDRALVDTQYLARISRAYLDTLFTEGGHVWVVPGRMTEMLRRHWGLNALLSDKDRGAGKVKNRTDHRHHAIDAAVIAATDHSLVNRISKAAGQGESAGQSAELIARDTPEPWEGFRNDISAQIARIVVSHRADHGRIDVEGRKHGKDSTAGRLHNDTAYGIVDDHTVVSRTPLLSLKPGDIEVTTKGKNIRDTQLQKALSVATTGKDGKGFEEALRNFAEKEGPYQGIRRVRLIETLQSSARVEVGSDEDGQPLKAYKGDSNHCYDLWKLPDGKVVPHVVSTYEAHAGTDKRPHPAAKRILRVFKKDMVAIEQDDQTAIFYVQKLDRANGLFLAPHLEANADARHRNPNDAFKFLQMGAGSVVRNKLRRVYVDEIGRIKDPGPPKH

SEQ ID NO: 33 - protein, 1027 aa, Blastopirellula marina
MFSESGDQPSLVDCGVRIFPEGVERDQQGGEKSKSQSRRVARGIRRQVRRRAQRLRHLKHALITTGLFPADVVDQQEVLASNPYELRSRALSEKLEPYEIGRILLHLAKRRGFLSNRTTDRSGGNELKGILAEMTQLQGEIAAHGCQTLGQYLHQLGDDGETFAQRLRGRHTLRAMYEDEFEKIWERQASYYPALLTEELRGGEEGKQSYPLVPTARRKSESLLKRFGLHGLLFFQRKMYWPKSVIGRCDLEPKEKRCPKADRLAQRFRILQEVNNLRLISPADRKEYTFAEFVGAGADKKLVDYLCEAKERTFPQIRKKFKLPETISFNYERGERSKLQGHETDAHFNGKKGLGKRRWSEIAEDVKDHIIQIVLEEDREDVALRKLTQDCSLTVEEAHKAMALHLPAGYSQYSRVAISRLLPHLELGKLLMGNDASDSAMHAAGYLRPDEREVRQYDLLPEPPDIPNPLVRQALYEVRKVINAIIREYGALGTIRVELAREAKKSAEQRTQIRIANAKRERENAAIAKTLQEMSPAIRPTRRNIQRYLLWKDQGGVCIYTGKVISQAQLFDSGEVDVDHILPRWRSLDDSMANKVIAHRSANNEKGDRTPWEWLGHDKPRFDELLLRAQRLPYGKRQRFIQKEVELTNFVERQLRDTTYVSRLVVQYLKGLGVPITTVKGPMTAELRHHWGLNALLNEDGSQKKNRSDHRHHAIDAIVIGLTDAKRLHALANARGKDLQPPWSEFRSDVATALGRMAVSHRVRRRIQGALHEETIYGPTQKAAQPTSTDQRPWAKDWIEDSQIVVRRKSVSDLTNTKHLAKIRDVTIRKILEDHLRRQKVDPTKPGVIPKDAFAGSNAPQMPSGVPIKKVRLVERGETWRKIGSGEASKFIKPGSNHHISYFAISRKGRESWKAHVTIMLDAACIAKESINNGKIVNRSIGDQGRFLMSLSIGEMFEITNNGGEILLCVVRKIDQSGRIYYKIHDDARESMDLKKDNLYMSPSKMQQFDARKVTVTPLGKIRNAND

SEQ ID NO: 34 - protein, 158 aa, Francisella tularensis
MIDFLLELDPCITIPPYLDNNNRKPPKCQSLILNPKFLDNQYPNWQQYLQELKKLQSIQDYLDSFETDLKDLKSSKDQPYFVEYKSSNQQMASGQRDYKDLDARILQFIFDRVKASDELLLSEIYFQAKKLKQKASSELEKLESSKKLDEVIANSQLS

SEQ ID NO: 35 - protein, 393 aa, Francisella tularensis
MNVKILPIAIDLDVKNTGVFSAFYQKGTSLEKLDNKNGKVYELSKDSYTLLMNNRTAQRHQRRGIDRKQLVKRLFKLVWTEQLNLEWDKDTQQAISFLFNRRGFSFITDGYSTEYLNIVPEQVKAILMDIFDDYNGEDDLDSYLKLATEQESKISEIYNKLMQKILEFKLRKLCTDIKDDKVSTKTLKEITSYEFELLADYLANYSESLKTQKFSYTDKQGNLKELSYYHHDKYNIQEFLKRHATINDEILDTLLTDDFDIWNFNFEKFDFDKNEEKLQSQEDKDHTQAYFHHFVFAVNKIKSEMASGGRHRSQYFQEITNVLDENNHQEGYLKNFCENLHNKKYSNLSVKNLVNLVGNLSNLELKPLRKYFNDKNLIIGMSKSLQKLIATGY

SEQ ID NO: 36 - protein, 1066 aa, Rhodopseudomonas palustris
MSERVVRRILGIDLGIASCGWGVVDISGAGGGIIATGVRCFDAPLIDKTGEPKSATRRTARGQRRIVRRRRQRMNGVRRLLCEFGLLPDPRPDALNQAMRRISTASAAAQVTPWTLRAAAHQRLLSNEELAVVLGHIARHRGFRSNAKNEAGANAADETSKMKKAMEATREGLAKYHAFGDMIANDPKFANRKRNRDKDYSHTAKRSDLEDEVRAILRAQLRFGSAAATETLAQTFADVAFFQRPLQDSEDRVGDCPFEPGQKRAARRAPSFELFRFLSRLANLKLAVGRSPERRLTAEEIALAAKGFGETKKTITFKSLREALDLDPNARFSGIGKDKEASLDVVARTGGAAYGTKTLKDALGDAPWRSLSRTPETLDRIAEILSFREDITSIRNGLEDLGLDSLVVEALMQAAANGDFKEFTRAGHISARAARNIIPGLREGLVYSEACARVGYDHAARLSVPLDQVGSPVTRKALSEALKQVRAVAREYGPIDYFHIELARSVGKSAEERKQLTDGIEARNVEKAKRRKQAEEHLGRAPSDDELLRYELAKEQNFKCIYSGDAIDPAGVAANDTRYQVDHILPWSRFGDDSYLNKTLCTARSNQNKRGRTPFEWFEADKTDVEWMEYVARVENLQEVKGRKKRNYSIKDAAAIEDKFKARNLTDTQWATRLLADELSRMFPPRECERAICGRADGGNDGLTIVEERRVFTRPGAITSKLRRAWGLEGLKKQDGKRVEDDRHHAVDALVLAATTESLLQRLTVEVQRREREGRPDDIFHCAEPWRGFRADVRRTVYGSETMPGIFVSRAERRRARGKAHDATIKQIREIEGERLVFERKPVEKLTDKDLEKIPIPKPYGQVSDPKRLRDELVESLRAWIAAGKPKDRPPLSPKGDVIRKVRIQTNDKVSVEINGGTVDRGDMARVDVFRKKNKKAVWEYYVVPIYPHQIVALNDPPDRAVIAYAEDKDWKEIDSSYEFLWSLFGLSYVEISKANGECIDGYFRGLHRGTGAASVCKHISLGKDATVSGIGLKTLASFKKFTIDRLGRKFEIPREVRTWRGEACT

SEQ ID NO: 37 - protein, 1149 aa, Lactobacillus salivarius
MERYHIGLDIGTSSIGWAVIGDDFKIKRKKGKNLIGVRLFKEGDTAAERRGFRTQRRRLNRRKWRLKLLEEIFDPYMAEVDKYFFARLKESNLSPKDSNKKYLGSLLFPDISDSNFYDKYPTIYHLRRDLMEKDKKFDLREIYLAIHHIVKYRGNFLEKVPAKNYKNSGASIGFLLEEVNDLYGNIIGNEDVAILDNDKFEDVEKIILNDEIRNIDKQKNVGRLLVKDKKEKNIVTAFSKAIFGYKFNLEDLLLIESDEKNKLTFNDENIDDIFNELSHSLNDNQMDLLTKTREIYFKFKLNMIVPTGYTISESMIEKYEMHKAHLKMYKEFINTLNAKDRKILKNAYSDYINNEKAKAANAQENFYKTVKKTIKENDSDTAKKIIGLIDEGNFMPKQRTGENGVIPHQLHQIELDRIIENQAKYYPWLAEENPVEKNRKFAKYKLDELVTFRVPYYVGPLIDKTESNKNEKETKFAWMVRKAKGTITPWNFENLVDRTESANRFIKRMTSKDTYIIGEDVLPASSLLYEKYKVLNELNNIKVNKKKLDVEQKQHVYLDLFTTRKNVTKDDLATSLNCDVESITGLTDNKKFNSSLSSYIDLKAILGNIVDDYSKNEDLEKIIEYSTIFEDGNIYKEKLSEISWLTDEQIEKLSNIHFKGWGRLSKKLLTQITNENGERIIDTLWNTSNNFIQVISDESIQAKLAEINGEYANKYNLEDILDEAYTSPQNKKAIRQVMKVVEDIEKAMKCEPTSIAIEFTREKRKSKLTNTRYKKISETYEKITDELISEYELGKLQSELDSKVNNMRDRYYLYFMQLGRDMYTGEKMNIDELHQKYDIDHILPQSFIKDDSLNNRVLTSKSVNIKEKSDKTAADLYAAKMGDFWRKLRKQGLMTEQKYKNLLTRTDSINKYTKQSFIKRQLVETSQVVKLAANILQDKYRNTKIIEIRARLNSDLRKKYELIKNREVNDYHHAIDGYLTTFVGQYLYKVYPKLRSYFVYDDFKKLDSNYLKHMDKFNFIWKLEDKKAEDVYDKVNDEFVLNVPEMKEYIRKIYNYKYMLVSKEVTTKNGAFYDQTKYNAKTINLIPIKKDKPTNIYGGYKGKVSSYMMLVKIQKKKEVIYKFVGVPRLWTDELDRLIDTDEKKALLKK

SEQ ID NO: 38 - protein, 1064 aa, Rhodopseudomonas palustris
MSECVTRRILGIDLGIASCGWGVIEVGEASGSIIASGVRCFDAPLIDKTGEPKSATRRTARGQRRIIRRRRQRMNAVRRLLAEFGVLTGRSPDALHQALLRLSQSVAGSQVTPWTLRAAAHERKLTNDELAVVLGHIARHRGFRSNSKNDGGANAADETSKMKKAMETTREGLARYHSFGAMIASDPKFADRKRNRDKDYSHTAKRSDLEDEVRTIFRSQTRFGSLVASEKLSQAFADAAFFQRPLQDSEDMVGSCPFEPGQKRTARRAPSFELFRFLSRLANLKLTVGRAPERRLTPDEIALAAKGFGETKKSITFKSLREALDLDPNARFSGVAKEKESTLDVAARTGGAAYGTKTLKDALGDAPWRSLSRMPEKLDRIAEILSFREDMKAIRNGLEEVGLDGLVVDALMQATANGDFKDFTRAAHISALAARNIIPGLREGLVYSDACTRVGYDHAARPAVPLSQIGSPVTRKALSEALKQVRAVAREYGPIDYFHIELARSIGKSAEERKKLTDGIEARNVEKEKRRKEAAEHLGRAPSDDELLRYELAKEQNFKCIYSGDPIDPAGISANDTRYQVDHILPWSRFGDDSYVNKTLCTARSNQNKRGRTPFEWFDADKTEAEWMEYSARVEDLKEVKGRKKRNYSIKDAASVEDKFKARNLTDTQWATRLLADELKRMFPPRECERVVTVRADGGNDGLSIVEERRVFTRPGAITSKLRRAWGLEGLKKQDGKRVEDDRHHAVDALVLAATTESLLNRLTVEVQQREREGRQDDIFHCSQPWPGFRVDVQRTVYGSETMPGIFVSRAERRRARGKAHDATVKQIRDIDGERIVFERKPIEKLTDKDLERIPVPEPYGKAADPKKLRDELVENLRAWIAAGKPKDKPPRSPKGDIIRKVRIETKDKVAVEINGGTVDRGDMARVDVFRKKNKKGVWEFYVIPIYPHQIVASALPPNRAVIAYKAESEWTAIDGCFEFAWSLNPMSYLELVKSNGELIEGYFRSMDRTTGAINLSPMSTNSETIRSIGVKTLSSFRKFTVDRLGRKFEIPREVRTWRGEACT

SEQ ID NO: 39 - protein, 1166 aa, Nitrobacter hamburgensis
MHVEIDFPHFSRGDSHLAMNKNEILRGSSVLYRLGLDLGSNSLGWFVTHLEKRGDRHEPVALGPGGVRIFPDGRDPQSGTSNAVDRRMARGARKRRDRFVERRKELIAALIKYNLLPDDARERRALEVLDPYALRKTALTDTLPAHHVGRALFHLNQRRGFQSNRKTDSKQSEDGAIKQAASRLATDKGNETLGVFFADMHLRKSYEDRQTAIRAELVRLGKDHLTGNARKKIWAKVRKRLFGDEVLPRADAPHGVRARATITGTKASYDYYPTRDMLRDEFNAIWAGQSAHHATITDEARTEIEHIIFYQRPLKPAIVGKCTLDPATRPFKEDPEGYRAPWSHPLAQRFRILSEARNLEIRDTGKGSRRLTKEQSDLVVAALLANREVKFDKLRTLLKLPAEARFNLESDRRAALDGDQTAARLSDKKGFNKAWRGFPPERQIAIVARLEETEDENELIAWLEKECALDGAAAARVANTTLPDGHCRLGLRAIKKIVPIMQDGLDEDGVAGAGYHIAAKRAGYDHAKLPTGEQLGRLPYYGQWLQDAVVGSGDARDQKEKQYGQFPNPTVHIGLGQLRRVVNDLIDKYGPPTEISIEFTRALKLSEQQKAERQREQRRNQDKNKARAEELAKFGRPANPRNLLKMRLWEELAHDPLDRKCVYTGEQISIERLLSDEVDIDHILPVAMTLDDSPANKIICMRYANRHKRKQTPSEAFGSSPTLQGHRYNWDDIAARATGLPRNKRWRFDANAREEFDKRGGFLARQLNETGWLARLAKQYLGAVTDPNQIWVVPGRLTSMLRGKWGLNGLLPSDNYAGVQDKAEEFLASTDDMEFSGVKNRADHRHHAIDGLVTALTDRSLLWKMANAYDEEHEKFVIEPPWPTMRDDLKAALEKMVVSHKPDHGIEGKLHEDSAYGFVKPLDATGLKEEEAGNLVYRKAIESLNENEVDRIRDIQLRTIVRDHVNVEKTKGVALADALRQLQAPSDDYPQFKHGLRHVRILKKEKGDYLVPIANRASGVAYKAYSAGENFCVEVFETAGGKWDGEAVRRFDANKKNAGPKIAHAPQWRDANEGAKLVMRIHKGDLIRLDHEGRARIMVVHRLDAAAGRFKLADHNETGNLDKRHATNNDIDPFRWLMASYNTLKKLAAVPVRVDELGRVWRVMPN

SEQ ID NO: 40 - protein, 641 aa, Nitrobacter hamburgensis
MHKRNSRSYRLGLDLGSNSLGWFVTHLEKRGDRYEPVALDPGGVRIFPDGRDPQSGMSNAVDRRMARGARKRRDRFVDPYALRKAALTNALPAHRVGRAIFHLNQRRGFQSNRKTDRKQSEDGAIKQAASKLKARMHEEAAPTLGAFFADMHLRKSYDDQQTAIRAELVRLGKDHLTGNARKKVWAKVRKRLFGDEVLRPKDTSDGARARATTTGTKASYDFYPTRAMLLDEFNAIWAAQREHHLAMTDEAKAEIEHIIFYHRPLKPAIVGKCTLDPATRPFKEDPEGYRAPWSHPLAQRFRILSEARNLEIRETGKTSRRLTKDQSDLVVAALLANREVKFDKLRTLLKLPAEARFNLESDRRSTATRPPHGCRTRRASIRRGAGFLRNGRSRSSPDWKKPKTKTNCSHGSKWNAHLTAQRPRASPIRRCRTAIAGSACAQSKRSCRSCRTSSMRMALRAPAITSWPSVPATTIPVDTFQQGGNAFGRILSVVTIELFAITDRVDPVQEQDARCFALRIAECRSDGLQHFAEVSLGLPPRNAAQDQRHSAGLCQSSCVGRFVPGTPCRRTPRSTSLHGKEPSAHAFGSTARSRPQLPASPRPCMSFRDGTSSSPARMPETLDRCAISRSNRSSVCRAERL

SEQ ID NO: 41 - protein, 1368 aa, Streptococcus pyogenes
MDKKYSIGLDIGTNSVGWAVITDDYKVPSKKFKVLGNTDRHSIKKNLIGALLFDSGEIAEATRLKRTARRRYTRRKNRICYLQEIFSNEMAKVDDSFFHRLEESFLVEEDKKHERHPIFGNIVDEVAYHEKYPTIYHLRKKLVDSTDKADLRLIYLALAHMIKFRGHFLIEGDLNPDNSDVDKLFIQLVQTYNQLFEENPINASGVDAKAILSARLSKSRRLENLIAQLPGEKKNGLFGNLIALSLGLTPNFKSNFDLAEDAKLQLSKDTYDDDLDNLLAQIGDQYADLFLAAKNLSDAILLSDILRLNSEITKAPLSASMIKRYDEHHQDLTLLKALVRQQLPEKYKEIFFDQSKNGYAGYIDGGASQEEFYKFIKPILEKMDGTEELLAKLNREDLLRKQRTFDNGSIPHQIHLGELHAILRRQEDFYPFLKDNREKIEKILTFRIPYYVGPLARGNSRFAWMTRKSEETITPWNFEEVVDKGASAQSFIERMTNFDKNLPNEKVLPKHSLLYEYFTVYNELTKVKYVTEGMRKPAFLSGEQKKAIVDLLFKTNRKVTVKQLKEDYFKKIECFDSVEISGVEDRFNASLGTYHDLLKIIKDKDFLDNEENEDILEDIVLTLTLFEDREMIEERLKTYAHLFDDKVMKQLKRRRYTVWGRLSRKLINGIRDKQSGKTILDFLKSDGFANRNFMQLIHDDSLTFKEDIQKAQVSGQGDSLHEHIANLAGSPAIKKGILQTVKVVDELVKVMGRHKPENIVIEMARENQTTQKGQKNSRERMKRIEEGIKELGSQILKEHPVENTQLQNEKLYLYYLQNGRDMYVDQELDINRLSDYDVDHIVPQSFIKDDSIDNKVLTRSDKNRGKSDNVPSEEVVKKMKNYWRQLLNAKLITQRKFDNLTKAERGGLSELDKAGFIKRQLVETRQITKHVAQILDSRMNTKYDENDKLIREVKVITLKSKLVSDFRKDFQFYKVREINNYHHAHDAYLNAVVGTALIKKYPKLESEFVYGDYKVYDVRKMLAKSEQEIGKATAKYFFYSNIMNFFKTEITLANGEIRKRPLIETNGETGEIVWDKGRDFATVRKVLSMPQVNIVKKTEVQTGGFSKESILPKRNSDKLIARKKDWDPKKYGGFDSPTVAYSVLVVAKVEKGKSKKLKSVKELLGITIMERSSFEKNPIDFLEAKGYKEVRKDLIIKLPKYSLFELENGRKRMLASAGELQKGNELALPSKYVNFLYLASHYEKLKGSPEDNEQKQLFVEQHKHYLDEIIEQISEFSKRVILADANLDKVLSAYNKHRDKPIREQAENIIHLFTLTNLGAPTAFKYFDTTIDRKRYTSTKEVLDATFIHQSITGLYETRIDLSQLGGD

SEQ ID NO: 42 - protein, 1368 aa, Streptococcus pyogenes
MDKKYSIGLDIGTNSVGWAVITDDYKVPSKKFKVLGNTDRHSIKKNLIGALLFDSGETAEATRLKRTARRRYTRRKNRICYLQEIFSNEMAKVDDSFFHRLEESFLVEEDKKHERHPIFGNIVDEVAYHEKYPTIYHLRKKLVDSTDKADLRLIYLALAHMIKFRGHFLIEGDLNPDNSDVDKLFIQLVQTYNQLFEENPINASGVDAKAILSARLSKSRRLENLIAQLPGEKKNGLFGNLIALSLGLTPNFKSNFDLAEDAKLQLSKDTYDDDLDNLLAQIGDQYADLFLAAKNLSDAILLSDILRLNSEITKAPLSASMIKRYDEHHQDLTLLKALVRQQLPEKYKEIFFDQSKNGYAGYIDGGASQEEFYKFIKPILEKMDGTEELLAKLNREDLLRKQRTFDNGSIPHQIHLGELHAILRRQEDFYPFLKDNREKIEKILTFRIPYYVGPLARGNSRFAWMTRKSEETITPWNFEEVVDKGASAQSFIERMTNFDKNLPNEKVLPKHSLLYEYFTVYNELTKVKYVTEGMRKPAFLSGEQKKAIVDLLFKTNRKVTVKQLKEDYFKKIECFDSVEISGVEDRFNASLGTYHDLLKIIKDKDFLDNEENEDILEDIVLTLTLFEDREMIEERLKTYAHLFDDKVMKQLKRRRYTGWGRLSRKLINGIRDKQSGKTILDFLKSDGFANRNFMQLIHDDSLTFKEDIQKAQVSGQGDSLHEHIANLAGSPAIKKGILQTVKVVDELVKVMGRHKPENIVIEMARENQTTQKGQKNSRERMKRIEEGIKELGSQILKEHPVENTQLQNEKLYLYYLQNGRDMYVDQELDINRLSDYDVDHIVPQSFIKDDSIDNKVLTRSDKNRGKSDNVPSEEVVKKMKNYWRQLLNAKLITQRKFDNLTKAERGGLSELDKAGFIKRQLVETRQITKHVAQILDSRMNTKYDENDKLIREVKVITLKSKLVSDFRKDFQFYKVREINNYHHAHDAYLNAVVGTALIKKYPKLESEFVYGDYKVYDVRKMIAKSEQEIGKATAKYFFYSNIMNFFKTEITLANGEIRKRPLIETNGETGEIVWDKGRDFATVRKVLSMPQVNIVKKTEVQTGGFSKESILPKRNSDKLIARKKDWDPKKYGGFDSPTVAYSVLVVAKVEKGKSKKLKSVKELLGLTIMERSSFEKNPIDFLEAKGYKEVKKDLIIKLPKYSLFELENGRKRMLASAGELQKGNELALPSKYVNFLYLASHYEKLKGSPEDNEQKQLFVEQHKHYLDEIIEQISEFSKRVILADANLDKVLSAYNKHRDKPIREQAENIIHLFTLTNLGAPAAFKYFDTTIDRKRYTSTKEVLDATLIHQSITGLYETRIDLSQLGGD

SEQ ID NO: 43 - protein, 1368 aa, Streptococcus pyogenes
MDKKYSIGLDIGTNSVGWAVITDDYKVPSKKFKVLGNTDRHSIKKNLIGALLFDSGEIAEATRLKRTARRRYTRRKNRICYLQEIFSNEMAKVDDSFFHRLEESFLVEEDKKHERHPIFGNIVDEVAYHEKYPTIYHLRKKLVDSTDKADLRLIYLALAHMIKFRGHFLIEGDLNPDNSDVDKLFIQLVQTYNQLFEENPINASGVDAKAILSARLSKSRRLENLIAQLPGEKKNGLFGNLIALSLGLTPNFKSNFDLAEDAKLQLSKDTYDDDLDNLLAQIGDQYADLFLAAKNLSDAILLSDILRLNSEITKAPLSASMIKRYDEHHQDLTLLKALVRQQLPEKYKEIFFDQSKNGYAGYIDGGASQEEFYKFIKPILEKMDGTEELLAKLNREDLLRKQRTFDNGSIPHQIHLGELHAILRRQEDFYPFLKDNREKIEKILTFRIPYYVGPLARGNSRFAWMTRKSEETITPWNFEEVVDKGASAQSFIERMTNFDKNLPNEKVLPKHSLLYEYFTVYNELTKVKYVTEGMRKPAFLSGEQKKAIVDLLFKTNRKVTVKQLKEDYFKKIECFDSVEISGVEDRFNASLGTYHDLLKIIKDKDFLDNEENEDILEDIVLTLTLFEDREMIEERLKTYAHLFDDKVMKQLKRRRYTGWGRLSRKLINGIRDKQSGKTILDFLKSDGFANRNFMQLIHDDSLTFKEDIQKAQVSGQGDSLHEHIANLAGSPAIKKGILQTVKVVDELVKVMGRHKPENIVIEMARENQTTQKGQKNSRERMKRIEEGIKELGSQILKEHPVENTQLQNEKLYLYYLQNGRDMYVDQELDINRLSDYDVDHIVPQSFIKDDSIDNKVLTRSDKNRGKSDNVPSEEVVKKMKNYWRQLLNAKLITQRKFDNLTKAERGGLSELDKAGFIKRQLVETRQITKHVAQILDSRMNTKYDENDKLIREVKVITLKSKLVSDFRKDFQFYKVREINNYHHAHDAYLNAVVGTALIKKYPKLESEFVYGDYKVYDVRKMLAKSEQEIGKATAKYFFYSNIMNFFKTEITLANGEIRKRPLIETNGETGEIVWDKGRDFATVRKVLSMPQVNIVKKTEVQTGGFSKESILPKRNSDKLIARKKDWDPKKYGGFDSPTVAYSVLVVAKVEKGKSKKLKSVKELLGITIMERSSFEKNPIDFLEAKGYKEVRKDLIIKLPKYSLFELENGRKRMLASAGELQKGNELALPSKYVNFLYLASHYEKLKGSPEDNEQKQLFVEQHKHYLDEIIEQISEFSKRVILADANLDKVLSAYNKHRDKPIREQAENIIHLFTLTNLGAPTAFKYFDTTIDRKRYTSTKEVLDATFIHQSITGLYETRIDLSQLGGD

SEQ ID NO: 44 - protein, 1371 aa, Streptococcus pyogenes
MDKKYSIGLDIGTNSVGWAVITDDYKVPSKKFKVLGNTDRHSIKKNLIGALLFDSGETAEATRLKRTARRRYTRRKNRICYLQEIFSNEMAKVDDSFFHRLEESFLVEEDKKHERHPIFGNIVDEVAYHEKYPTIYHLRKKLADSTDKADLRLIYLALAHMIKFRGHFLIEGDLNPDNSDVDKLFIQLVQTYNQLFEENPINASRVDAKAILSARLSKSRRLENLIAQLPGEKKNGLFGNLIALSLGLTPNFKSNFDLAEDAKLQLSKDTYDDDLDNLLAQIGDQYADLFLAAKNLSDATLLSDILRVNSEITKAPLSASMIKRYDEHHQDLTLLKALVRQQLPEKYKEIFFDQSKNGYAGYIDGGASQEEFYKFIKPILEKMDGTEELLAKLNREDLLRKQRTFDNGSIPHQIHLGELHAILRRQEDFYPFLKDNREKIEKILTFRIPYYVGPLARGNSRFAWMTRKSEETITPWNFEEVVDKGASAQSFIERMTNFDKNLPNEKVLPKHSLLYEYFTVYNELTKVKYVTEGMRKPAFLSGEQKKAIVDLLFKTNRKVTVKQLKEDYFKKIECFDSVEISGVEDRFNASLGTYHDLLKIIKDKDFLDNEENEDILEDIVLTLTLFEDKEMIEERLKTYAHLFDDKVMKQLKRRHYTGWGRLSRKLINGIRDKQSGKTILDFLKSDGFANRNFIQLIHDDSLTFKEAIQKAQVSGQGHSLHEQIANLAGSPAIKKGILQSVKVVDELVKVMGHKPENIVIEMARENQTTQKGQKNSRERMKRIEEGIKELGSQILKEHPVENTQLQNEKLYLYYLQNGRDMYVDQELDINRLSDYDVDHIVPQSFIKDDSIDNKVLTRSDKNRGKSDDVPSEEVVKKMKNYWRQLLNAKLITQRKFDNLTKAERGGLSELDKAGFIKRQLVETRQITKHVAQILDSRMNTKYDENDKLIREVKVITLKSKLVSDFRKDFQFYKVREINNYHHAHDAYLNAVVGTALIKKYPKLESEFVYGDYKVYDVRKMIAKSEQEIGKATAKRFFYSNIMNFFKTEITLANGEIRKRPLIETNEETGEIVWDKGRDFATVRKVLSMPQVNIVKKTEVQTGALTNESIYARGSFDKLISRKHRFESSKYGGFGSPTVTYSVLVVAKSKVQDGKVKKIKTGKELIGITLLDKLVFEKNPLKFIEDKGYGNVQIDKCIKLPKYSLFEFENGTRRMLASVMANNNSRGDLQKANEMFLPAKLVTLLYHAHKIESSKELEHEAYILDHYNDLYQLLSYIERFASLYVDVEKNISKVKELFSNIESYSISEICSSVINLLTLTASGAPADFKFLGTTIPRKRYGSPQSILSSTLIHQSITGLYETRIDLSQLGSD

SEQ ID NO: 45 - protein, 1121 aa, Streptococcus thermophilus
MSDLVLGLDIGIGSVGVGILNKVTGEIIHKNSRIFPAAQAENNLVRRTNRQGRRLARRKKHRRVRLNRLFEESGLITDFTKISINLNPYQLRVKGLTDELSNEELFIALKNMVKHRGISYLDDASDDGNSSVGDYAQIVKENSKQLETKTPGQIQLERYQTYGQLRGDFTVEKDGKKHRLINVFPTSAYRSEALRILQTQQEFNPQITDEFINRYLEILTGKRKYYHGPGNEKSRTDYGRYRTSGETLDNIFGILIGKCTFYPDEFRAAKASYTAQEFNLLNDLNNLTVPTETKKLSKEQKNQIINYVKNEKAMGPAKLFKYIAKLLSCDVADIKGYRIDKSGKAEIHTFEAYRKMKTLETLDIEQMDRETLDKLAYVLTLNTEREGIQEALEHEFADGSFSQKQVDELVQFRKANSSIFGKGWHNFSVKLMMELIPELYETSEEQMTILTRLGKQKTTSSSNKTKYIDEKLLTEEIYNPVVAKSVRQAIKIVNAAIKEYGDFDNIVIEMARETNEDDEKKAIQKIQKANKDEKDAAMLKAANQYNGKAELPHSVFHGHKQLATKIRLWHQQGERCLYTGKTISIHDLINNSNQFEVDHILPLSITFDDSLANKVLVYATANQEKGQRTPYQALDSMDDAWSFRELKAFVRESKTLSNKKKEYLLTEEDISKFDVRKKFIERNLVDTRYASRVVLNALQEHFRAHKIDTKVSVVRGQFTSQLRRHWGIEKTRDTYHHHAVDALIIAASSQLNLWKKQKNTLVSYSEDQLLDIETGELISDDEYKESVFKAPYQHFVDTLKSKEFEDSILFSYQVDSKFNRKISDATIYATRQAKVGKDKADETYVLGKIKDIYTQDGYDAFMKIYKKDKSKFLMYRHDPQTFEKVIEPILENYPNKQINEKGKEVPCNPFLKYKEEHGYIRKYSKKGNGPEIKSLKYYDSKLGNHIDITPKDSNNKVVLQSVSPWRADVYFNKTTGKYEILGLKYADLQFEKGTGTYKISQEKYNDIKKKEGVDSDSEFKFTLYKNDLLLVKDTETKEQQLFRFLSRTMPKQKHYVELKPYDKQKFEGGEALIKVLGNVANSGQCKKGLGKSNISIYKVRTDVLGNQHIIKNEGDKPKLDF

SEQ ID NO: 46 - protein, 1388 aa, Streptococcus thermophilus
MTKPYSIGLDIGTNSVGWAVTTDNYKVPSKKMKVLGNTSKKYIKKNLLGVLLFDSGITAEGRRLKRTARRRYTRRRNRILYLQEIFSTEMATLDDAFFQRLDDSFLVPDDKRDSKYPIFGNLVEEKAYHDEFPTIYHLRKYLADSTKKADLRLVYLALAHMIKYRGHFLIEGEFNSKNNDIQKNFQDFLDTYNAIFESDLSLENSKQLEEIVKDKISKLEKKDRILKLFPGEKNSGIFSEFLKLIVGNQADFRKCFNLDEKASLHFSKESYDEDLETLLGYIGDDYSDVFLKAKKLYDAILLSGFLTVTDNETEAPLSSAMIKRYNEHKEDLALLKEYIRNISLKTYNEVFKDDTKNGYAGYIDGKTNQEDFYVYLKKLLAEFEGADYFLEKIDREDFLRKQRTFDNGSIPYQIHLQEMRAILDKQAKFYPFLAKNKERIEKILTFRIPYYVGPLARGNSDFAWSIRKRNEKITPWNFEDVIDKESSAEAFINRMTSFDLYLPEEKVLPKHSLLYETFNVYNELTKVRFIAESMRDYQFLDSKQKKDIVRLYFKDKRKVTDKDIIEYLHAIYGYDGIELKGIEKQFNSSLSTYHDLLNIINDKEFLDDSSNEAIIEEIIHTLTIFEDREMIKQRLSKFENIFDKSVLKKLSRRHYTGWGKLSAKLINGIRDEKSGNTILDYLIDDGISNRNFMQLIHDDALSFKKKIQKAQIIGDEDKGNIKEVVKSLPGSPAIKKGILQSIKIVDELVKVMGGRKPESIVVEMARENQYTNQGKSNSQQRLKRLEKSLKELGSKILKENIPAKLSKIDNNALQNDRLYLYYLQNGKDMYTGDDLDIDRLSNYDIDHIIPQAFLKDNSIDNKVLVSSASNRGKSDDVPSLEVVKKRKTFWYQLLKSKLISQRKFDNLTKAERGGLSPEDKAGFIQRQLVETRQITKHVARLLDEKFNNKKDENNRAVRTVKIITLKSTLVSQFRKDFELYKVREINDFHHAHDAYLNAVVASALLKKYPKLEPEFVYGDYPKYNSFRERKSATEKVYFYSNIMNIFKKSISLADGRVIERPLIEVNEETGESVWNKESDLATVRRVLSYPQVNVVKKVEEQNHGLDRGKPKGLFNANLSSKPKPNSNENLVGAKEYLDPKKYGGYAGISNSFTVLVKGTIEKGAKKKITNVLEFQGISILDRINYRKDKLNFLLEKGYKDIELIIELPKYSLFELSDGSRRMLASILSTNNKRGEIHKGNQIFLSQKFVKLLYHAKRISNTINENHRKYVENHKKEFEELFYYILEFNENYVGAKKNGKLLNSAFQSWQNHSIDELCSSFIGPTGSERKGLFELTSRGSAADFEFLGVKIPRYRDYTPSSLLKDATLIHQSVTGLYETRIDLAKLGEG

SEQ ID NO: 47 - protein, 1138 aa, Acidothermus cellulolyticus
MGGSEVGTVPVTWRLGVDVGERSIGLAAVSYEEDKPKEILAAVSWIHDGGVGDERSGASRLALRGMARRARRLRRFRRARLRDLDMLLSELGWTPLPDKNVSPVDAWLARKRLAEEYVVDETERRRLLGYAVSHMARHRGWRNPWTTIKDLKNLPQPSDSWERTRESLEARYSVSLEPGTVGQWAGYLLQRAPGIRLNPTQQSAGRRAELSNATAFETRLRQEDVLWELRCIADVQGLPEDVVSNVIDAVFCQKRPSVPAERIGRDPLDPSQLRASRACLEFQEYRIVAAVANLRIRDGSGSRPLSLEERNAVIEALLAQTERSLTWSDIALEILKLPNESDLTSVPEEDGPSSLAYSQFAPFDETSARIAEFIAKNRRKIPTFAQWWQEQDRTSRSDLVAALADNSIAGEEEQELLVHLPDAELEALEGLALPSGRVAYSRLTLSGLTRVMRDDGVDVHNARKTCFGVDDNWRPPLPALHEATGHPVVDRNLAILRKFLSSATMRWGPPQSIVVELARGASESRERQAEEEAARRAHRKANDRIRAELRASGLSDPSPADLVRARLLELYDCHCMYCGAPISWENSELDHIVPRTDGGSNRHENLAITCGACNKEKGRRPFASWAETSNRVQLRDVIDRVQKLKYSGNMYWTRDEFSRYKKSVVARLKRRTSDPEVIQSIESTGYAAVALRDRLLSYGEKNGVAQVAVFRGGVTAEARRWLDISIERLFSRVAIFAQSTSTKRLDRRHHAVDAVVLTTLTPGVAKTLADARSRRVSAEFWRRPSDVNRHSTEEPQSPAYRQWKESCSGLGDLLISTAARDSIAVAAPLRLRPTGALHEETLRAFSEHTVGAAWKGAELRRIVEPEVYAAFLALTDPGGRFLKVSPSEDVLPADENRHIVLSDRVLGPRDRVKLFPDDRGSIRVRGGAAYIASFHHARVFRWGSSHSPSFALLRVSLADLAVAGLLRDGVDVFTAELPPWTPAWRYASIALVKAVESGDAKQVGWLVPGDELDFGPEGVTTAAGDLSMFLKYFPERHWVVTGFEDDKRINLKPAFLSAEQAEVLRTERSDRPDTLTEAGEILAQFFPRCWRATVAKVLCHPGLTVIRRTALGQPRWRRGHLPYSWRPWSADPWSGGTP

SEQ ID NO: 48 - protein, 1629 aa, Francisella novicida
MNFKILPIAIDLGVKNTGVFSAFYQKGTSLERLDNKNGKVYELSKDSYTLLMNNRTARRHQRRGIDRKQLVKRLFKLIWTEQLNLEWDKDTQQAISFLFNRRGFSFITDGYSPEYLNIVPEQVKAILMDIFDDYNGEDDLDSYLKLATEQESKISEIYNKLMQKILEFKLMKLCTDIKDDKVSTKTLKEITSYEFELLADYLANYSESLKTQKFSYTDKQGNLKELSYYHHDKYNIQEFLKRHATINDRILDTLLTDDLDIWNFNFEKFDFDKNEEKLQNQEDKDHIQAHLHHFVFAVNKIKSEMASGGRHRSQYFQEITNVLDENNHQEGYLKNFCENLHNKKYSNLSVKNLVNLIGNLSNLELKPLRKYFNDKIHAKADHWDEQKFTETYCHWILGEWRVGVKDQDKKDGAKYSYKDLCNELKQKVTKAGLVDFLLELDPCRTIPPYLDNNNRKPPKCQSLILNPKFLDNQYPNWQQYLQELKKLQSIQNYLDSFETDLKVLKSSKDQPYFVEYKSSNQQIASGQRDYKDLDARILQFIFDRVKASDELLLNEIYFQAKKLKQKASSELEKLESSKKLDEVIANSQLSQILKSQHTNGIFEQGTFLHLVCKYYKQRQRARDSRLYIMPEYRYDKKLHKYNNTGRFDDDNQLLTYCNHKPRQKRYQLLNDLAGVLQVSPNFLKDKIGSDDDLFISKWLVEHIRGFKKACEDSLKIQKDNRGLLNHKINIARNTKGKCEKEIFNLICKIEGSEDKKGNYKHGLAYELGVLLFGEPNEASKPEFDRKIKKFNSIYSFAQIQQIAFAERKGNANTCAVCSADNAHRMQQIKITEPVEDNKDKIILSAKAQRLPAIPTRIVDGAVKKMATILAKNIVDDNWQNIKQVLSAKHQLHIPIITESNAFEFEPALADVKGKSLKDRRKKALERISPENIFKDKNNRIKEFAKGISAYSGANLTDGDFDGAKEELDHIIPRSHKKYGTLNDEANLICVTRGDNKNKGNRIFCLRDLADNYKLKQFETTDDLEIEKKIADTIWDANKKDFKFGNYRSFINLTPQEQKAFRHALFLADENPIKQAVIRAINNRNRTFVNGTQRYFAEVLANNIYLRAKKENLNTDKISFDYFGIPTIGNGRGIAEIRQLYEKVDSDIQAYAKGDKPQASYSHLIDAMLAFCIAADEHRNDGSIGLEIDKNYSLYPLDKNTGEVFTKDIFSQIKITDNEFSDKKLVRKKAIEGFNTHRQMTRDGIYAENYLPILIHKELNEVRKGYTWKNSEEIKIFKGKKYDIQQLNNLVYCLKFVDKPISIDIQISTLEELRNILTTNNIAATAEYYYINLKTQKLHEYYIENYNTALGYKKYSKEMEFLRSLAYRSERVKIKSIDDVKQVLDKDSNFIIGKITLPFKKEWQRLYREWQNTTIKDDYEFLKSFFNVKSITKLHKKVRKDFSLPISTNEGKFLVKRKTWDNNFIYQILNDSDSRADGTKPFIPAFDISKNEIVEAIIDSFTSKNIFWLPKNIELQKVDNKNIFAIDTSKWFEVETPSDLRDIGIATIQYKIDNNSRPKVRVKLDYVIDDDSKINYFMNHSLLKSRYPDKVLEILKQSTIIEFESSGFNKTIKEMLGMKLAGIYNETSNN

SEQ ID NO: 49 - protein, 1068 aa, Verminephrobacter eiseniae
MNKAVAYRLALDLGSTSLGWAIFRLNEAREPTAIIRAGVRIFSDGRNANSEPLAVHRRVARAMRRRRDRLLKRKKRMHDQLVQHGFFPAEVAERKELERLNPYQLRAKGLHEALTPGEFARALFHINQRRGFKSNRKTDRKDNDSGALKQAISELRKRIQDSDCATAGEWFWKERMQQKPEGVRGQWVRARYRKTPSTTDEGKKRIGYDLYVDRAMVEQEFDALWAAQAALQPGLFTEAARAELKDTLLYQRDLRPVKPGRCTLLPAEERAPLALPSTQRFRILQEVNNLRLLDEALREVPLNLAQRDAVVSALEGKKELSFAAIRKLLTLSGKFNLEDEKRAELKGNATSVILARKDLFGDAWAGFDAAVQDEIVWRLVSQESEGALIAWLQQHTGVDGVCAEAIVNTRLPDGYGRLSRKALERIVPALQREVCTYDKAVQAAGFAHHSDLGFDFDYAEDEVQQVGEHTIASTGEVQAQYAFKQLPYYGKALQRHVAFGSGDAKDHEEKCYGKIANPTVHIGLNQVRTVVNALIRRYGHPTEVVVELARDLKQSREQKQQTQREQADNQKRNEDIRKRIAPILETSPERVRDRDIKKWILWEELNKKDIADRHCPYSGERISATMLLSEAVEIEHILPFSRTLDDSLNNRTVAMRRANRIKGDRTPWEARADFEAQGWRYEAILQRAEGMPPRKRYRFAEDGYQRWLGKDRNFLARALNDTSYLSRLAANYLRLVCPQGVRVIPGQMTDKLRGKFGLNSVLGLDGKKNRNDHRHHAVDACVIGVTDQGLMQRFANASKQARENGLTRLVQDMLLPWWPSYYDHVERAVRHIRVSHRPDHGFEGAMMKGTAHGIREDGIREDGRIKQRPKAKGSADHKTITLIPIDEPRQLARHGVDAEGKPLPYKGYASGSNYCIEITKNGKGKWEGQVISTFDAYRIKAAADAAARAGQVISTVEADSIVRKSGWERLRGAQSQNGQPLVMRLVIGDSVRMEVDGRDEVMRVVKMSGKEMVFAPVREANVDKRNNMPDEQDPFTYTYKRADQLRKAKARQVTISPIGELRDPGFKG

SEQ ID NO: 50 - protein, 1125 aa, Francisella tularensis
MNVKILPIAIDLDVKNTGVFSAFYQKGTSLEKLDNKNGKVYELSKDSYTLLMNNRTARRHQRRGIDRKQLVKRLFKLVWTEQLNLEWDKDTQQAISFLFNRRGFSFITDGYSTEYLNIVPEQVKAILMDIFDDYNGEDDLDSYLKLATEQESKISEIYNKLMQKILEFKLRKLCTDIKDDKVSTKTLKEITSYEFELLADYLANYSESLKIQKFSYTDKQGNLKELSYYHHDKYNIQEFLKRHATINDEILDTLLTDDFDIWNFNFEKFDFDKNEEKLQNQEDKDHTQAHLHHFVFAVNKIKSEMASGGRHRSQYFQEITNVLDENNHQEGYLKNFCENLHNKKYSNLSVKNLVNLVGNLSNLELKPLRKYFNDKIHAKADHWDEQKFTETYCHWILGEWRVGVKDQDKKDGAKYSYKDLCNELKQKVTKAGLIDFLLELDPCRTIPPYLDNNNRKPPKCQSLILNPKFLDNQYPNWQQYLQELKKLQSIQDYLDSFETDLKDLKSSKDQPYFVEYKSSNQQMASGQRDYKDLDARILQFIFDRVKASDELLLNEIYFQAKKLKQKASSELEKLESSKKLDEVIANSQLSQILKSQHTNGIFEQGTFLHLVCKYYKQRQRARDSRLYIMPEYRYDKKLDKYNNTGRFDDNNQLLTYCNHKPRQKRYQLLNDLAGVLQVSRNQLLSSVEEWFQQAQRVGEISKSQDEQIFEWLKSFKIASYCKAAVEMQKQYRGTLKNAIQTAIFRQSENINKNKNKNTGNQQQALSENSKDVKSLTADEKKLLKLIENIAKASQKIGESLGLNDKQIKKFNSIYSFAQIQQIAFAERKGNANTCAVCSADNAHRMQQIKITELVEDNKDNIILSAKAQRLPAIPTRIVDGAVKKMATILAKNIVDDNWQNIKQVLSAKHQLHIPIITESNAFEFEPALADVKGKSLKDRRKKALERISPENIFKDKNNRIKEFAKGISAYSGANLTDGDFDGAKEELDHIIPRSHKKYGTLNDEANLICVTRDDNKNIFAIDTSKWFEIETPSDLRDIGVATIQYKIDNNSRPKVRVKLDYVIDDDSKINYFMNHSLLKSRYPDKVLEILKQSTIIEFESSGFNKTIKEMLGMTLAGIYNETSNN

SEQ ID NO: 51 - protein, 1064 aa, Bradyrhizobium sp.
MKRTSLRAYRLGVDLGANSLGWFVVWLDDHGQPEGLGPGGVRIFPDGRNPQSKQSNAAGRRLARSARRRRDRYLQRRGKLMGLLVKHGLMPADEPARKRLECLDPYGLRAKALDEVLPLHHVGRALFHLNQRRGLFANRAIEQGDKDASAIKAAAGRLQTSMQACGARTLGEFLNRRHQLRATVRARSPVGGDVQARYEFYPTRAMVDAEFEAIWAAQAPHHPTMTAEAHDTIREAIFSQRAMKRPSIGKCSLDPATSQDDVDGFRCAWSHPLAQRFRIWQDVRNLAVVETGPTSSRLGKEDQDKVARALLQTDQLSFDEIRGLLGLPSDARFNLESDRRDHLKGDATGAILSARRHFGPAWHDRSLDRQIDIVALLESALDEAAIIASLGTTHSLDEAAAQRALSALLPDGYCRLGLRAIKRVLPLMEAGRTYAEAASAAGYDHALLPGGKLSPTGYLPYYGQWLQNDVVGSDDERDTNERRWGRLPNPTVHIGIGQLRRVVNELIRWHGPPAEITVELTRDLKLSPRRLAELEREQAENQRKNDKRTSLLRKLGLPASTHNLLKLRLWDEQGDVASECPYTGEAIGLERLVSDDVDIDHLIPFSISWDDSAANKVVCMRYANREKGNRTPFEAFGHRQGRPYDWADIAERAARLPRGKRWRFGPGARAQFEELGDFQARLLNETSWLARVAKQYLAAVTHPHRIHVLPGRLTALLRATWELNDLLPGSDDRAAKSRKDHRHHAIDALVAALTDQALLRRMANAHDDTRRKIEVLLPWPTFRIDLETRLKAMLVSHKPDHGLQARLHEDTAYGTVEHPETEDGANLVYRKTFVDISEKEIDRIRDRRLRDLVRAHVAGERQQGKTLKAAVLSFAQRRDIAGHPNGIRHVRLTKSIKPDYLVPIRDKAGRIYKSYNAGENAFVDILQAESGRWIARATTVFQANQANESHDAPAAQPIMRVFKGDMLRIDHAGAEKFVKIVRLSPSNNLLYLVEHHQAGVFQTRHDDPEDSFRWLFASFDKLREWNAELVRIDTLGQPWRRKRGLETGSEDATRIGWTRPKKWP

SEQ ID NO: 52 - protein, 1354 aa, Flavobacterium psychrophilum
MKKILGLDLGTNSIGWAFINEAENEIEVSSIVNTGVRIVPLTTDEESDFKKGNTISINADRTLKRGARRGLQRFKQRREALLETFNRIKFIATDFVYAETGAATTFSSYQLRAKSAVEAVTKEELVKVLLMLNKKRGYKSSRKAKTAEEGDAIDGMKIAKEIFENNLTPGQWVYNSLSKGGKFIPDFYHSDLQKELEKIVRFQNQFHSEQINDKLLADIQGKSRTQTSQHFSKTLNIPLAENKGTREETKLQHYQWRNEALANELDMKILAFIITEINNQINQSSGYLGAISDRSKELYFNQETVGQYQYKQLQENVHAKLKNQVFYRQDYLDEFEKIWETQAKFHSELNEKLKAEIRDITIFYQRKLKSQKHLVSFCEFEKGHKAIPKSSPLFQEFRIWQNLNNVVVKNETTKEVFELSEELKQLIAEELQFKESMTDVQMLTFCELKKGTHTVNFKKIEGNRTNTSIYKAFEKILEVEGYEIDFSKMKPLEIKETVAPIFETLNINTVILDFDPTIQGNDFDKQPYYQLWHLLYSAEDDDKLKETLKTKFGFKENHLPFILNINLQADYGSLSAKAIKKILPHLMDGHIYDKACLMVGYNHSSSLTTAQNNDRVLKDTLELLKKNSLRNPVVEKILNQMINVINAIMKDPAMGKPDEIRVELARELKANNEQRKKATSDINTATTEHERIRKLLHSEFNIPRVTRNDIIRYKLWLETGGISLYTGNPIKASDLFSKNYDIEHIIPKSRLFDDSFSNKTLCERQLNIDKSNKTAYSFLQEKLSENDFAAYENRVKDLFKTGKIKSYTKYKKLLMADNEIPEGFIDRQLRETQYIAKKAKEILLEVSRNVTATIGSVTDKLRQDWELVDVMKELNWEKYDKLGLTHIEEGKNGERLSKIKDWTKRNDHRHHAMDAITVAFTKPAYIQYLNNLNAKTQGENKANSIIGIENKHLYRDKNNKLRFISPMKNFREEAKKQLESILISYKAKNKVVTKNKNTTKKSGGTNQKIQLTPRGRLHKETVYGKLQQYATKEEKVNASFTEDYIQKVAKKEYREALLKRLEENDNDPKKAFTGKNALNKTPIYISLKDNIIVPEKVKTVWLETDYTIRKDITPDLKIDKVIDVGIKRILQNRLNEFNGDPKKAFVNLGESPIWLNKEKGIAIKRVTISGVSNAQALHTKKDHLGNEILDKNGNPIPVDFISTGNNHHVAIYRDEKGNLQEEVVSFYDAVIRRNLGLSVINKNHEKGWEFLFSMKQNEFFIFPSDGFNPHEIDLLNPNNYHLISPNIFRVQKISTKNYMFNHHLETKAVDGEMLKSKKELSKTSYHFIQTPTNLNGIIKVRINHLGKIVHLGEY

SEQ ID NO: 53 - protein, 1062 aa, Actinobacillus succinogenes
MNLNYILGLDLGIASVGWAVVEIDEQENPQRLIDVGVRTFDRAEVLKTGESLALARRLARSSRRLVKRRAERIKKAKRLLKAENLLLSADEILPNEAWQLRVKGLDQKLERQEWAAVLLHLLKHRGYLSQRKNESKSENKELGALLSGVAINHQILQSAEYRTPAEIAVNKFQAEEGHIRNQRGAYTHTFSRLDLLAEMELLFQRQATLGNPHTSTKLLENLTALLMWQKPALAGEAILKMLGKCTFEPTEYKAAKNSYSAERFVWLTKLNNLRILEQGAERALTDNERFALLDQPYEKAKLTYAQVRTLLGLSDEAIFKGLRYQGEDKKAVETKTTLMEVKAYHQIRKALEGLDLKAEWNELKNNPALLDEIGTAFSLYKTDDDIHRYLDGKLSESVLNALLENLNFDKFIQLSLKALQQILPLMLQGQRYDEAVSAIYGDHYGKKSDEIDRLLPNIPTDEIRNPVVLRTLTQARKVINAVVRLYGSPARIHIETGREVGKSYQDRKKLEKQQEENRKQRENAVKKFKEYFPNFVGEPKGKDILKMRLYELQQAKCLYSGKSLELYRLLEKGYVEVDHALPFSRTWDDSFNNKVLVLANENQNKGNATPYEWLDGKNNSEGWQHFVARVQTSGFSYAKKQRVLIQELDEKSFIERNLNDTRYVARFLCNHIADNMLLTGKGKRKVFASNGQITALLRGCWGLQKVRENNDRHHALDAVVVACSTKSMQDKITKFVKYKEGRLFKDKKDGVYKGERINRETGEIISLHFPTPWKFFKENVEIRIFSENPKLELENRLPDYPQYNHEFVQPLFVSRMPTRKMTGQGHMETVKSAKRLDKGLSVLKVPLTQLKLSDLERMVNREREMALYEALKECLEQFGNDPAKAFAEPFYKKGGALVKAVRVEQTQKSGVLVRNGNGVADNATGSIVRVDVFTKGGKYFLVPIYTWQVAKGILPNKAVIQGKDESEWEEMDENAVFQFSMHKNDLIKVKTKKGEIFGYFNGLDRATGSIEIEEHDLEKSKGKNGSHRGLGVKTAFFLEKYQVDELGKNIRPCRPTKRQHVR

SEQ ID NO: 54 - protein, 1340 aa, Dorea longicatena
MEQEYYLGLDMGTGSVGWAVTDSEYHVLRKHGKALWGVRLFESASTAEERRMFRTSRRRLDRRNWRIEILQEIFAEEISKKDPGFFLRMKESKYYPEDKRDINGNCPELPYALFVDDDFTDKDYHKKFPTIYHLRKMLMNTEETPDIRLVYLAIHHMMKHRGHFLLSGDINEIKEFGTTFSKLLENIKNEELDWNLELGKEEYAVVESILKDNMLNRSTKKTRLIKALKAKSICEKAVLNLLAGGTVKLSDIFGLEELNETERPKISFADNGYDDYIGEVENELGEQFYIIETAKAVYDWAVLVEILGKYTSISEAKVATYEKHKSDLQFLKKIVRKYLTKEEYKDIFVSTSDKLKNYSAYIGMTKINGKKVDLQSKRCSKEEFYDFIKKNVLKKLEGQPEYEYLKEELERETFLPKQVNRDNGVIPYQIHLYELKKILGNLRDKIDLIKENEDKLVQLFEFRIPYYVGPLNKIDDGKEGKFTWAVRKSNEKIYPWNFENVVDIEASAEKFIRRMTNKCTYLMGEDVLPKDSLLYSKYMVLNELNNVKLDGEKLSVELKQRLYTDVFCKYRKVTVKKIKNYLKCEGIISGNVEITGIDGDFKASLTAYHDFKEILTGTELAKKDKENIITNIVLFGDDKKLLKKRLNRLYPQITPNQLKKICALSYTGWGRFSKKFLEEITAPDPETGEVWNIITALWESNNNLMQLLSNEYRFMEEVETYNMGKQTKTLSYETVENMYVSPSVKRQIWQTLKIVKELEKVMKESPKRVFIEMAREKQESKRTESRKKQLIDLYKACKNEEKDWVKELGDQEEQKLRSDKLYLYYTQKGRCMYSGEVIELKDLWDNTKYDIDHIYPQSKTMDDSLNNRVLVKKKYNATKSDKYPLNENIRHERKGFWKSLLDGGFISKEKYERLIRNTELSPEELAGFIERQIVETRQSTKAVAEILKQVFPESEIVYVKAGTVSRFRKDFELLKVREVNDLHHAKDAYLNIVVGNSYYVKFTKNASWFIKENPGRTYNLKKMFTSGWNIERNGEVAWEVGKKGTIVTVKQIMNKNNILVTRQVHEAKGGLFDQQIMKKGKGQIAIKETDERLASIEKYGGYNKAAGAYFMLVESKDKKGKTIRTIEFIPLYLKNKIESDESIALNFLEKGRGLKEPKILLKKIKIDTLFDVDGFKMWLSGRTGDRLLFKCANQLILDEKIIVTMKKIVKFIQRRQENRELKLSDKDGIDNEVLMEIYNTFVDKLENTVYRIRLSEQAKTLIDKQKEFERLSLEDKSSTLFEILHIFQCQSSAANLKMIGGPGKAGILVMNNNISKCNKISIINQSPTGIFENEIDLLKI

SEQ ID NO: 55 - protein, 984 aa, Campylobacter jejuni
MAKILAFDIGISSIGWAFSENDELKDCGVRIFTKAENPKTGESLALPRRIARSARKRLARRKARLNHLKHLIANEFKLNYEDYQSFDEILAKAYKGSLISPYELRFRALNELLSKQDFARVILHIAKRRGYDDIKNNGDEEKGKILKAIKQNEEKLANYQSVGEYLYKEYFQKFKENSKEFINVRNKKESYERCIAQSFLKDELKLIFKKQREFGFSFSKKFEEEVLSVAFYKRALKDFSHLVGNCSFFTDEKRAPKNSPLAFMFVALTRIINLLNNLKNTLYTKDDLNALLNEVLKNGTLTYKQTKKLLGLSDDYEFKGEKGNYFIEFKKYKEFIKALGEHSLSQDDLNEIAKDITLIKDEIKLKKALAKYDLNENQIDNLSKLEFKDHLNISFKALKLITPLMLEGKKYDEACNELTLKVAINEDKKDFLPAFNETYYKDEVTNPVVLRAIKEYRKVLNALLKKYGKVHKINIELAREVGKNHSQRAKIEKEQNENYKAKKDAELECEKLGLKINSKNILKLRLFKEQKEFCVYSGEKIKLSDLQDEKMLEIDHIYPYSRSFDDSYMNKVLVFTKQNQEKLNQTPFEAFGNDSAKWQKIEVLAKNLPTKKQKRILDKNYKDKEQKDFKDRNLNDTRYIARLVLNYTKDYLDFLPLSDDENTKLNDTQKGSKVHVEAKSGMLTSALRHTWGFSTKDRNNHLHHAIDAVIIAYANNSIVKAFSDFKKEQESNTAELYAKKISELDYKNKRKFFEPFSGFRQKVLDKIDEIFVSKPERKKPSGALHEETFRKEEEFYQSYGGKEGVLKALELGKIRKVNGKIVKNGDMFRVDIFKHKKTNKFYAVPIYTMDFALKVLPNKAVARSKKGEIKDWILMDENYEFCFSLYKDSLILIQTKDMQEPEFVYYNAFTSSTVSLIVSKHDNKFETLSKNQKILFKNANEKEVIAKSIGIQNLKVFEKYIVSALGEVTKAEFRQREEFKNELR

SEQ ID NO: 56 - protein, 1037 aa, Parvibaculum lavamentivorans
MERIFGFDIGTTSIGFSVIDYSSTQSAGNIQRLGVRIFPEARDPDGTPLNQQRRQKRMMRRQLRRRRIRRKALNETLHEAGFLPAYGSADWPVVMADEPYELRRRGLEEGLSAYEFGRAIYHLAQHRHFKGRELEESDTPDPDVDDEKEAANERAATLKALKNEQTTLGAWLARRPPSDRKRGIHAHRNVVAEEFERLWEVQSKFHPALKSEEMRARISDTIFAQRPVFWRKNTLGECRFMPGEPLCPKGSWLSQQRRMLEKLNNLAIAGGNARPLDAEERDAILSKLQQQASMSWPGVRSALKALYKQRGEPGAEKSLKFNLELGGESKLLGNALEAKLADMFGPDWPAHPRKQEIRHAVHERLWAADYGETPDKKRVIILSEKDRKAHREAAANSFVADFGITGEQAAQLQALKLPTGWEPYSIPALNLFLAELEKGERFGALVNGPDWEGWRRTNFPHRNQPTGEILDKLPSPASKEERERISQLRNPTVVRTQNELRKVVNNLIGLYGKPDRIRIEVGRDVGKSKREREEIQSGIRRNEKQRKKATEDLIKNGIANPSRDDVEKWILWKEGQERCPYTGDQIGFNALFREGRYEVEHIWPRSRSFDNSPRNKTLCRKDVNIEKGNRMPFEAFGHDEDRWSAIQIRLQGMVSAKGGTGMSPGKVKRFLAKTMPEDFAARQLNDTRYAAKQILAQLKRLWPDMGPEAPVKVEAVTGQVTAQLRKLWTLNNILADDGEKTRADHRHHAIDALTVACTHPGMTNKLSRYWQLRDDPRAEKPALTPPWDTIRADAEKAVSEIVVSHRVRKKVSGPLHKETTYGDTGTDIKTKSGTYRQFVTRKKIESLSKGELDEIRDPRIKEIVAAHVAGRGGDPKKAFPPYPCVSPGGPEIRKVRLTSKQQLNLMAQTGNGYADLGSNHHIAIYRLPDGKADFEIVSLFDASRRLAQRNPIVQRTRADGASFVMSLAAGEAIMIPEGSKKGIWIVQGVWASGQVVLERDTDADHSTTTRPMPNPILKDDAKKVSIDPIGRVRPSND

SEQ ID NO: 57 - protein, 1107 aa, Eubacterium ventriosum
MGYTVGLDIGVASVGVAVLDENDNIVEAVSNIFDEADTSNNKVRRTLREGRRTKRRQKTRIEDFKQLWETSGYIIPHKLHLNIIELRNKGLTELLSLDELYCVLLSMLKHRGISYLEDADDGEKGNAYKKGLAFNEKQLKEKMPCEIQLERMKKYGKYHGEFIIEINDEKEYQSNVFTTKAYKKELEKIFETQRCNGNKINTKFIKKYMEIYERKREYYIGPGNEKSRTDYGIYTTRTDEEGNFIDEKNIFGKLIGKCSVYPEEYRASSASYTAQEFNLLNDLNNLKINNEKLTEFQKKEIVEIIKDASSVNMRKIIKKVIDEDIEQYSGARIDKKGKEIYHTFEIYRKLKKELKTINVDIDSFTREELDKTMDILTLNTERESIVKAFDEQKFVYEENLIKKLIEFRKNNQRLFSGWHSFSYKAMLQLIPVMYKEPKEQMQLLTEMNVFKSKKEKYVNYKYIPENEVVKEIYNPVVVKSIRTTVKILNALIKKYGYPESVVIEMPRDKNSDDEKEKIDMNQKKNQEEYEKILNKIYDEKGIEITNKDYKKQKKLVLKLKLWNEQEGLCLYSGKKIAIEDLLNHPEFFEIDHIIPKSISLDDSRSNKVLVYKTENSIKENDTPYHYLTRINGKWGFDEYKANVLELRRRGKIDDKKVNNLLCMEDITKIDVVKGFINRNLNDTRYASRVVLNEMQSFFESRKYCNTKVKVIRGSLTYQMRQDLHLKKNREESYSHHAVDAMLIAFSQKGYEAYRKIQKDCYDFETGEILDKEKWNKYIDDDEFDDILYKERMNEIRKKIIEAEEKVKYNYKIDKKCNRGLCNQTIYGTREKDGKIHKISSYNIYDDKECNSLKKMINSGKGSDLLMYNNDPKTYRDMLKILETYSSEKNPFVAYNKETGDYFRKYSKNHNGPKVEKVKYYSGQINSCIDISHKYGHAKNSKKVVLVSLNPYRTDVYYDNDTGKYYLVGVKYNHIKCVGNKYVIDSETYNELLRKEGVLNSDENLEDLNSKNITYKFSLYKNDIIQYEKGGEYYTERFLSRIKEQKNLIETKPINKPNFQRKNKKGEWENTRNQIALAKTKYVGKLVTDVLGNCYIVNMEKFSLVVDK

SEQ ID NO: 58 - protein, 1136 aa, Streptococcus gordonii
MNGLVLGLDIGIASVGVGILEKDTGKIIHASSRLFPAATADNNVERRSNRQGRRLNRRKKHRSVRLQDLFEGYGLLTDFSKVSMNLNPYQLRVQGMENQLTNEELFVALKNIVKRRGISYLDDASEDGGTVSSDYGKAVEENRKLLAEKTPGQIQLERFEKYGQLRGDFTVEENGEKHRLINVFSTSAYRKEAERILRKQQEFNSKITDEFIEDYLIILTGKRKYYHGPGNEKSRTDYGRFRTDGTTLDNIFGILIGKCTFYTEEYRASKASYTAQEFNLLNDLNNLTVPTETKKLSEEQKKLIIEYAKSAKTLGASTLLKYIAKMIDASVDQIRGYRVDVNNKPEMHTFEVYRKMQSLETIKVEELPRKVLDELAHILTLNTEREGIEEAINSKLKDIFNRDQVLELVQFRKNNSSLFSKGWHNFSIKLMMELIPELYETSEEQMTILTRLGKQRSKETSKRTKYIDEKELTEEIYNPVVAKSVRQAIKIINEATKKYGIFDNIVIEMARENNEEDAKKDYIKRQKANQDEKNAAMEKAAFQYNGKKELPDNIFHGHKELTTKIRLWHQQGEKCLYTGKNIPISDLIHNQYKYEIDHILPLSLSFDDSLSNKVLVLATANQEKGQRTPFQALDSMDDAWSYREFKSYVKDSKLLSNKKKDYLLTEEDISKIEVKQKFIERNLVDTRYSSRVVLNALQDFYKSHQLDTTISVVRGQFTSQLRRKWGIEKSRETYHHHAVDALIIAASSQLRLWKKHSNPLIAYKEGQFVDSETGEIVSLSDEEYKELVFKAPYDHFVDTLRSKKFEDSILFSYQVDSKYNRKISDATIYATRKAKLDKEKKEYTYTLGKIKDIYALGTKTPSKTGFYKFLDLYKTDKSQFLMYQKDRKTWDEVIEKIIEQYRPFKEYDKNGKEVDFNPFEKYRIGNGPIRKYSKKGNGPEIKSLKYYDILLGKHKNITPDGSRNTVALLSLNPWRTDVYYNSETKKYEFLGLKYADLCFEEGGAYGISEVKYKKIREKEGIGKNSEFKFTLYKNDLILIKDTETNCQQFFRFWSRTGKDNPKSFEKHKIELKPYEKAKFEKGEELKVLGKVPPSSNQFQKNMQIENLSIYKVKTDILGNKHFIKKEGDEPKLKFKK

SEQ ID NO: 59 - protein, 984 aa, Campylobacter jejuni
MARILAFDIGISSIGWAFSENDELKDCGVRIFTKAENPKTGESLALPRRLARSARKRLARRKARLNHLKHLIANEFKLNYEDYQSFDESLAKAYKGSLISPYELRFRALNELLSKQDFARVILHIAKRRGYDDIKNNGDEEKSEILKAIKQNEEKLVNYQSVGEYLYKEYFQKFKENSKEFINVRNKKESYERCITQSFLKDELKLIFQKQREFGFSFSKKFEEEVLSVAFYKRALKDFSHLVGNCSFFTDEKRAPKNSPLAFMFVALTRIINILNNLKNTEGILYTKDDLNALLNEVLKNGTLTYKQTKKLLGLSDDYEFKGEKGTYFIEFKKYKEFIKALGEHNLSQDDLNEIAKDITLIKDEIKLKKALAKYDLNQNQIDSLSKLEFKDHLNISFKALKLITPLMLEGKKYDEACNELNLKVAINEDKKDFLPAFNETYYKDEVTNPVVLRAIKEYRKILNALLKKYGKVHKINIELAREVGKNHSQRAKIEKEQNENYKAKKDAEIECEKLGLKINSKNILKLRLFKEQKEFCAYSGEKIKLSDLQDEKMLEIDHIYPYSRSFDDSYMNKVLVFTKQNQEKLNKTPFEAFGNDSTKWQKIEVLAKNLPEKKQKRILDKNYKDKEQKDFKDRNLNDTRYIARLVLNYTKDYLDFLPLSDDENTKLNDTQKGSKVHVEAKSGMLTSALRHTWGFSAKDRNNHLHHAIDAAIIAYANNSIVKAFSDFKKEQESNSVELYAKKISELDYKNKRKFFEPFSGFRQKVLDKIDEIFVSKPERKKPSGALHEETFRKEEEFYQSYGGKEGVLKALELGKIRKVNGKIVKNGDMFRVDIFKHKKTNKFYAVPIYTMDFALKVLPNKAVARSKKGEIKDWILMDENYEFCFSLYKDSLILIQTKDMQEPELVYFNAFTSSTVSLIVSKHDNKFETLSKNQKILFKNANEKEVIAKSIGIQNLKVFEKYIVSALGEVTKAEFRQREDFKK

SEQ ID NO: 60 - protein, 1079 aa, Dinoroseobacter shibae
MRLGLDIGTSSIGWWLYETDGAGSDARITGVVDGGVRIFSDGRDPKSGASLAVDRRAARAMRRRRDRYLRRRATLMKVLAETGLMPADPAEAKALEALDPFALRAAGLDEPLPLPHLGRALFHLNQRRGFKSNRKTDRGDNESGKIKDATARLDMEMMANGARTYGEFLHKRRQKATDPRHVPSVRTRLSIANRGGPDGKEEAGYDFYPDRRHLEEEFHKLWAAQGAHHPELTETLRDLLFEKIFFQRPLKEPEVGLCLFSGHHGVPPKDPRLPKAHPLTQRRVLYETVNQLRVTADGREARPLTREERDQVIHALDNKKPTKSLSSMVLKLPALAKVLKLRDGERFTLETGVRDAIACDPLRASPAHPDRFGPRWSILDADAQWEVISRIRRVQSDAEHAALVDWLTEAHGLDRAHAEATAHAPLPDGYGRLGLTATTRILYQLTADVVTYADAVKACGWHHSDGRTGECFDRLPYYGEVLERHVIPGSYHPDDDDITRFGRITNPTVHIGLNQLRRLVNRIIETHGKPHQIVVELARDLKKSEEQKRADIKRIRDTTEAAKKRSEKLEELEIEDNGRNRMLLRLWEDLNPDDAMRRFCPYTGTRISAAMIFDGSCDVDHILPYSRTLDDSFPNRTLCLREANRQKRNQTPWQAWGDTPHWHAIAANLKNLPENKRWRFAPDAMTRFEGENGFLDRALKDTQYLARISRSYLDTLFTKGGHVWVVPGRFTEMLRRHWGLNSLLSDAGRGAVKAKNRTDHRHHAIDAAVIAATDPGLLNRISRAAGQGEAAGQSAELIARDTPPPWEGFRDDLRVRLDRIIVSHRADHGRIDHAARKQGRDSTAGQLHQETAYSIVDDIHVASRTDLLSLKPAQLLDEPGRSGQVRDPQLRKALRVATGGKTGKDFENALRYFASKPGPYQAIRRVRIIKPLQAQARVPVPAQDPIKAYQGGSNHLFEIWRLPDGEIEAQVITSFEAHTLEGEKRPHPAAKRLLRVHKGDMVALERDGRRVVGHVQKMDIANGLFIVPHNEANADTRNNDKSDPFKWIQIGARPAIASGIRRVSVDEIGRLRDGGTRPI

SEQ ID NO: 61 - protein, 1096 aa, Eubacterium dolichum
MMEVFMGRLVLGLDIGITSVGFGIIDLDESEIVDYGVRLFKEGTAAENETRRTKRGGRRLKRRRVTRREDMLHLLKQAGIISTSFHPLNNPYDVRVKGLNERLNGEELATALLHLCKHRGSSVETIEDDEAKAKEAGETKKVLSMNDQLLKSGKYVCEIQKERLRTNGHIRGHENNFKTRAYVDEAFQILSHQDLSNELKSAIITIISRKRMYYDGPGGPLSPTPYGRYTYFGQKEPIDLIEKMRGKCSLFPNEPRAPKLAYSAELFNLLNDLNNLSIEGEKLTSEQKAMILKIVHEKGKITPKQLAKEVGVSLEQIRGFRIDTKGSPLLSELTGYKMIREVLEKSNDEHLEDHVFYDEIAEILTKTKDIEGRKKQISELSSDLNEESVHQLAGLTKFTAYHSLSFKALRLINEEMLKTELNQMQSITLFGLKQNNELSVKGMKNIQADDTAILSPVAKRAQRETFKVVNRLREIYGEFDSIVVEMAREKNSEEQRKAIRERQKFFEMRNKQVADIIGDDRKINAKLREKLVLYQEQDGKTAYSLEPIDLKLLIDDPNAYEVDHIIPISISLDDSITNKVLVTHRENQEKGNLTPISAFVKGRFTKGSLAQYKAYCLKLKEKNIKTNKGYRKKVEQYLLNENDIYKYDIQKEFINRNLVDTSYASRVVLNTLTTYFKQNEIPTKVFTVKGSLTNAFRRKINLKKDRDEDYGHHAIDALIIASMPKMRLLSTIFSRYKIEDIYDESTGEVFSSGDDSMYYDDRYFAFIASLKAIKVRKFSHKIDTKPNRSVADETIYSTRVIDGKEKVVKKYKDIYDPKFTALAEDILNNAYQEKYLMALHDPQTFDQIVKVVNYYFEEMSKSEKYFTKDKKGRIKISGMNPLSLYRDEHGMLKKYSKKGDGPAITQMKYFDGVLGNHIDISAHYQVRDKKVVLQQISPYRTDFYYSKENGYKFVTIRYKDVRWSEKKKKYVIDQQDYAMKKAEKKIDDTYEFQFSMHRDELIGITKAEGEALIYPDETWHNFNFFFHAGETPEILKFTATNNDKSNKIEVKPIHCYCKMRLMPTISKKIVRIDKYATDVVGNLYKVKKNTLKFEFD

SEQ ID NO: 62 - protein, 1082 aa, Neisseria meningitidis
MAAFKPNPINYILGLDIGIASVGWAMVEIDEDENPICLIDLGVRVFERAEVPKTGDSLAMARRLARSVRRLTRRRAHRLLRARRLLKREGVLQAADFDENGLIKSLPNTPWQLRAAALDRKLTPLEWSAVLLHLIKHRGYLSQRKNEGETADKELGALLKGVADNAHALQTGDFRTPAELALNKFEKESGHIRNQRGDYSHTFSRKDLQAELNLLFEKQKEFGNPHISDGLKEGIETLLMTQRPALSGDAVQKMLGHCTFEPAEPKAAKNTYTAERFIWLTKLNNLRILEQGSERPLTDTERTTLIDEPYRKSKLTYAQARKLLELDNTAFFKGLRYGKDNAEASTLMEMKAYHAISRALEKEGLKDKKSPLNLSPELQDEIGTAFSLFKTDEDITGRLKDRVQPEILEALLKHISFDKFVQISLKALRRIVPLMEQGKRYDEACAEIYGDHYGKKNTEEKIDLPPIPADEIRNPVVLRALSQARKVINGVVRRYGSPARIHIETAREVGKSFKDRKEIEKRQEENRKDREKAATKFREYFPNFVGEPKSKDILKLRLYEQQHGKCLYSGKEINLGRLNEKGYVEIDHALPFSRTWDDSFNNKVLVLGSENQNKGNQTPYEYFNGKDNSREWQEFKARVETSRFPRSKKQRILLQKFDEEGFKERNLNDTRYVNRFLCQFVADHMLLTGKGKRRVFASNGQITNLLRGFWGLRKVRAENDRHHALDAVVVACSTVAMQQKITRFVRYKEMNAFDGKTIDKETGEVLHQKTHFPQPWEFFAQEVMIRVFGKPDGKPEFEEADTPEKLRTLLAEKLSSRPEAVHEYVTPLFVSRAPNRKMSGQGHMETVKSAKRLDEGVSVLRVPLTQLKLKDLEKMVNREREPKLYEALKARLEAHKDDPAKAFAEPFYKYDKAGNRTQQVKAVRVEQVQKTGVWVRNHNGIADNATMVRVDVFEKGDKYYLVPIYSWQVAKGILPDRAVVQGKDEEDWQLIDDSFNFKFSLHPNDLVEVITKKARMFGYFASCHRGTGNINIRIHDLDHKIGKNGILEGIGVKTALSFQKYQIDELGKEIRPCRLKKRPPVR

SEQ ID NO: 63 - protein, 1050 aa, Gluconacetobacter diazotrophicus
MGENMIDESLTFGIDLGIGSCGWAVLRRPSAFGRKGVIEGMGSWCFDVPETSKERTPTNQIRRSNRLLRRVIRRRRNRMAAIRRLLHAAGLLPSTDSDALKRPGHDPWELRARGLDKPLKPVEFAVVLGHIAKRRGFKSAAKRKATNISSDDKKMLTALEATRERLGRYRTVGEMFARDPDFASRRRNREGKYDRTTARDDLEHEVHALFAAQRRLGQGFASPELEEAFTASAFHQRPMQDSERLVGFCPFERTEKRAAKLTPSFERFRLLARLLNLRITTPDGERPLTVDEIALVTRDLGKTAKLSIKRVRTLIGLEDNQRFTTIRPEDEDRDIVARTGGAMTGTATLRKALGEALWTDMQERPEQLDAIVQVLSFFEANETITEKLREIGLTLAVLDVLLTALDAGVFAKFKGAAHISTKAARNLLPHLEQGRRYDEACTMAGYDHAASRLSHHGQIVAKTQFNALVTEIGESIANPIARKALIEGLKQIWAMRNHWGLPGSIHVELARDVGNSIEKRREIEKHIEKNTALRARERREVHDLLDLEDVNGDTLLRYRLWKEQGGKCLYTGKAIHIRQIAATDNSVQVDHILPWSRFGDDSFNNKTLCLASANQQKKRSTPYEWLSGQTGDAWNAFVQRIETNKELRGFKKRNYLLKNAKEAEEKFRSRNLNDTRYAARLFAEAVKLLYAFGERQEKGGNRRVFTRPGALTAALRQAWGVESLKKQDGKRINDDRHHALDALTVAAVDEAEIQRLTKSFHEWEQQGLGRPLRRVEPPWESFRADVEATYPEVFVARPERRRARGEGHAATIRQVKERECTPIVFERKAVSSLKEADLERIKDGERNEAIVEAIRSWIATGRPADAPPRSPRGDIITKIRLATTIKAAVPVRGGTAGRGEMVRADVFSKPNRRGKDEWYLVPVYPHQIMNRKAWPKPPMRSIVANKDEDEWTEVGPEHQFRFSLYPRSNIEIIRPSGEVIEGYFVGLHRNTGALTISAHNDPKSIHSGIGTKTLLAISKYQVDRFGRKSPVRKEVRTWHGEACISPTPPG

SEQ ID NO: 64 - protein, 1391 aa, Kordia algicida
MKKILGLDLGTNSIGWALVNEAEHEHEQSSIVKLGVRVNPLSVDEKTNFEKGRPLSINADRTSKRSARRNLQRFKLRRKNLINLLLKHHIISNETILTEVGKNTTHQTLKLRSKATQEKISLEEFARILLSINKKRGYKSSRKEKNEDEGFTIDGMAIAKELYDNQLTPGQYVYNILQDGKNYIPDFYRSDLQAEFDDVWQFQKKFYSSILTDEFYLKLKGQGKENTRKLFLAIHQVYTAENKGKRDAVKLQYYKWRSEAVKKQLSIEEVAYVLVEINNNINKSSGYLGAISDRSKALYFNNETVGEYLYGQLVKNRHNSLRNQVFYRQDYLDEFEKIWETQAKFYDELTNELKQEIRDVVIFYQRKLKSQKHLISDCLFEKHHKAIPKSSPLFQEFKIWQNLNYLEFVHTQSKEKIFFSELDDETRQFVFAELNIRGTLKIKEIKKLIGLETPVYWKSNFDEIEGNRTNQVLYNVYQNIADDLGYGFDWSKKHAFEINAELQAIFKDVGIDTAILNFDASIEENDFDKQKSYQLWHLLYSAEDTDKATEEDKLIYGNINTKLKKQLHQKYGFEAKYGNLLANISLQQDYGNLSAKAIKKILPYLESGNSFYEACTIVGYNPSNSLTKEQQQNRKLKDKLELLPKNSLRNPVVEKILNQKVNLINQLIDEYGKPDEVRIELARELKKSAKQRADLSKHINDATLKNQNIRKTLQKDFGIQNPSKNDVIRYKLYDELKDNGYKTLFTNKYIPKEQLFSKDVDIEHIIPKAILFDDSFSNKTLAYRNVNLAKADATAFDFISSKHLDDLDNYKARVETLFQSKRISKGKYKKLLMTRQNLPEDFIERDLRNSQYIAKKATAMLKEVFRSVVPTSGRITDKLREDWDLVNVMKELNLPKYRTLGLTEFIERKNGNKIEQIIDWTKRNDHRHHAMDALTVAFTTHNHIQYLNNLNVTHGLNGVDTDHEKSRLYAIKQAITKVYIVGKTKKRKFIPPMENFRSHAKNHLEGILISFKNKNKVVTKNKNRTKTKTKGVFNEKIQLTPRGQLHKETIYGHAKKVIVTKEKVSSKFTHEKILQVTKPAYREALLKRLASFKNDPKKAFSGKNALSKNPLYFDITSGKKVPDTVKLSYFENSYVIRKEVNSDNFKNEKSLQKVLDVGIRRILEKRLADYNGNAKEAFSNLEKNPIWKDKEKGVCIKKVRIEALKNAEPLHVKKDHLGKIILDDENKSTPVDFISTGNNHHVAIYEDKDGKLHDKVVSFYEVVSRVNLGLPIIDKSFNSHLDWKFLFSMKQNEMFVFPSEDFNPKEIDIGNPKNNELISKYLFRVQKFSKVTYGNSAVRDYVFRHHLETELIDKKELKGITYYQLKSIGMLEKLVKVRINHIGKIVHIGEY

SEQ ID NO: 65 - protein, 1116 aa, Clostridium spiroforme
MVEFLLKEMKIMGRLVLGLDIGITSVGYGVIDIDKNEFVDYGVRLFKEGTAINNEERRSKRGARRLKRRKTNRIADMKKLLERNGLIDEQYTALNNPYEIRKKGLKNKLSNYELATAILHITKNRGTCLESNADETQDEESTKNILSKNALELKDKYICEIQLARLEESGKIRGINNNFKTEDYLKELSKILENQDLEKETIDKIKEIVARRRRYDQGPGSEKSPTPYGSYRMENGELVHVNLIDMMRGKCSVFPDQLRAPQQSYSAELFNLLNDLNNLKINGEKLSSTEKQKIIDFVNEKGGITVKQLLKLIDVGITEISGFRIDKNEKPLITEFKGYKKVLKVFKNYNQESLLNDKSIVDTIMDINTKIKSIDERSDQLKQVLPSLDTSIINDLASIKGVSGYHSLSLKALNLINNEMLKTEMNQMQVLHQLDIFDKNRVSLKGQRQIYADDNAILSPVAKRAHRETFKVINKLRSIYGEFDSIVIETTRDKNTQDQKKRIKNNQKNYEERNTEVNNFLKEAGYNPENINAKTKMKIRLYIEQDAKSAYTLQDINLKELIEDEKAYEIDHIIPISISLDDSFNNKVLTTHDENQEKGNLTPISAFLKGKFHNGNLNTYKVFIQNNKNLNRKKKEYLLCEDDITRYEVVQNFINRNLVDTSYACRTVMNTLVHYFKDNEINTKVHTIKGQATSTFRKRIGLIKDREEDYFHHAIDALIVASLKKMNLINSYLMKVDFNEMYDEETGEIFNVLPDNSYLDEKYISFVSNLKNIYEESNKYIRGVMIKEKMTYPLIKVSHKIDTKPNRKISDDTIYSTRNVDNQDMLVERIKNIYDPKENAANTLINDIINDNTDKYIMYHKDPQTFDKIKAIVLNHFNEFKTDKNCYIVTKEGLYKLKGTSPLALYYEEFGPITKYAKKNNGPTIHSMKFYSEKLGNHLSITHKYSTVNKKVITKQISPYRTDFYQSPEGKYKFVTVRYKDVAYNAKKDKYIIDHSWYREQKKLKKIADEWIFVCSVHRDELIGIMKADGQKRIFDSSTESDGETLYHDAKTYEILKFTATNNDITGRFEVKPIYCYCKKQLMVSIGTCRKIQKFATDVLGNLYIVKDNVLKLEFK

SEQ ID NO: 66 - protein, 1348 aa, Finegoldia magna
MKSEKKYYIGLDVGTNSVGWAVTDEFYNILRAKGKDLWGVRLFEKADTAANTRIFRSGRRRNDRKGMRLQILREIFEDEIKKVDKDFYDRLDESKFWAEDKKVSGKYSLFNDKNFSDKQYFEKFPTIFHLRKYLMEEHGKVDIRYYFLAINQMMKRRGHFLIDGQISHVTDDKPLKEQLILLINDLLKIELEEELMDSIFEILADVNEKRTDKKNNLKELIKGQDFNKQEGNILNSIFESIVTGKAKIKNIISDEDILEKIKEDNKEDFVLTGDSYEENLQYFEEVLQENITLFNTLKSTYDFLILQSILKGKSTLSDAQVERYDEHKKDLEILKKVIKKYDEDGKLFKQVFKEDNGNGYVSYIGYYLNKNKKITAKKKISNIEFTKYVKGILEKQCDCEDEDVKYLLGKIEQENFLLKQISSINSVIPHQIHLFELDKILENLAKNYPSFNNKKEEFTKIEKIRKTFTFRIPYYVGPLNDYHKNNGGNAWIFRNKGEKIRPWNFEKIVDLHKSEEEFIKRMLNQCTYLPEETVLPKSSILYSEYMVLNELNNLRINGKPLDTDVKLKLIEELFKKKTKVTLKSIRDYMVRNNFADKEDFDNSEKNLEIASNMKSYIDFNNILEDKFDVEMVEDLIEKITIHTGNKKLLKKYIEETYPDLSSSQIQKIINLKYKDWGRLSRKLLDGIKGTKKETEKTDTVINFLRNSSDNLMQIIGSQNYSFNEYIDKLRKKYIPQEISYEVVENLYVSPSVKKMIWQVIRVTEEITKVMGYDPDKIFIEMAKSEEEKKTTISRKNKLLDLYKAIKKDERDSQYEKLLTGLNKLDDSDLRSRKLYLYYTQMGRDMYTGEKIDLDKLFDSTHYDKDHIIPQSMKKDDSIINNLVLVNKNANQTTKGNIYPVPSSIRNNPKIYNYWKYLMEKEFISKEKYNRLIRNTPLTNEELGGFINRQLVETRQSTKAIKELFEKFYQKSKIIPVKASLASDLRKDMNTLKSREVNDLHHAHDAFLNIVAGDVWNREFTSNPINYVKENREGDKVKYSLSKDFTRPRKSKGKVIWTPEKGRKLIVDTLNKPSVLISNESHVKKGELFNATIAGKKDYKKGKIYLPLKKDDRLQDVSKYGGYKAINGAFFFLVEHTKSKKRIRSIELFPLHLLSKFYEDKNTVLDYAINVLQLQDPKIIIDKINYRTEIIIDNFSYLISTKSNDGSITVKPNEQMYWRVDEISNLKKIENKYKKDAILTEEDRKIMESYIDKIYQQFKAGKYKNRRTTDTIIEKYEIIDLDTLDNKQLYQLLVAFISLSYKTSNNAVDFTVIGLGTECGKPRITNLPDNTYLVYKSITGIYEKRIRIK

SEQ ID NO: 67 - protein, 1129 aa, Streptococcus infantarius
MSNGKILGLDIGVASVGVGIIDSKTGNVIHANSRLFSAANAENNAERRGFRGARRLTRRKKHRVKRVRDLFEKYDISTDFRNLNLNPYELRVKGLTEQLTNEELFAALRTIAKRRGISYLDDAEDDSTGSSDYAKSIDENRRLLKTKTPGQIQLERLEKYGQLRGNFTVYDENGEAHRLINVFSTSDYKNEARKILETQSNYNKQITDEFIEDYIEILTQKRKYYHGPGNEKSRTDYGRFRTDGTTLENIFGILIGKCSFYPEEYRASKASYTAQEFNFLNDLNNLKVPTETGKLSTEQKEYLVDFAKKSKALGASKLLKEIAKIVDCSVDDIKGYRVDNKDKPDLHTFEPYRKLKFNLSSIDIDELSRETLDKLADILTLNTEREGIEDAIKRNLPSQFTEEQISEIVQIRKNQSSAFNKGWHSFSAKLMNELIPELYVTSEEQMTILTRLEKFKVNKKSSKNTKTIDEKEITDEIYNPVVAKSVRQTIKIINAAVKKYGDFDKIVIEMPRDKNAEDEKKFIDKKQKENKKEKDDSLKRAAFLYNGTDNLPDGVFHGNKELKTKIRLWYQQGERCLYSGKLISIHDLVHNSNKFEIDHILPLSLSFDDSLANKVLVYAWTNQEKGQKTPYQVIDSMDTAWSFREMKDYVLKQKGLGKKKCEYLLTTENIDKIEVKKKFIERNLVDTRYASRVVLNSLQTALKELGKDTKVSVVRGQFTSQLRRKWNIDKSRETYHHHAVDALIIAASSQLKLWQKQENPMFESYGENQVVNKETGEILSISDDKYKELVFQPPYQGFVNTISSKGFEDEILFSYQVDSKFNRKVSDATIYSTRKAKLGKDKKDETYVLGKIKDIYSQDGFDTFIKRYKKDKTQFLMYQKDPLTWENVIEVILRDYPSEKLSEDGKKTVKCNPFEEYRRENGLICKYSKKGNGTPIKSLKYYDKKLGNCIDITPEKSKNRVVLRQISPWRADIYFNLETLKYELMGLKYSDLSFEKGTGKYHISQEKYDAIREKEGIGKKSEFKFTLYRNDLILIKDTLNNCERMLRFGSKNDTSKHYVELKPLEKGTFDSEEEILPVLGKVAKSGQFIKGLNKPNISIYKVRTDVLGNKFFIKKEGDKPKLDFKNNNK

SEQ ID NO: 68 - protein, 1065 aa, Clostridium perfringens
MNKDINYALGLDIGITSVGWAVINLDLNRIEDLGVRIFNAAENLKDGSSLALPRRLARGRRRLLRRKAYRVERVRKLILKNNILTKEELEGLFKNKEVIDVWEARVKGLDYKLSREEWAKILINFCKRRGFKSNRKNEAKDKEAGQILSSISYNIEKMKETNSRTIGEYIYNEVKNSEDSYAPLRNKFGEYKMCVSRDVIREEIHTLFEKQRELGNNFASDEIEDKYFEIFNSQRPFSNFEDLEKLVGFCTFERKKHKRAPKHCISSEEFTLYEGINKLSIIKDGEKRKLSEEERTLVVNEAFNKKEIKYTTLRKLLGLSEEELFSTLTYSIDKDISKTENTKFVSLKGYHEIKRAIEKGVSKKAWQDIENNRNLLNDIAYVLTLGKTDDEIEKQLRLRNVPEELFESLLDMSFNKFNNLSIYALEKILPFMKEGYQYNEACEKAGYNFKAIYEGVRTKKLPVIEIDEIVNPVVNRALAQTRKVINSVIDKYGSPVRINIELARDLAKNFKDRKLIEKEQKENRANLDKIRENLRELMDKEPTVVEVLKYRLWEQQRGECAYTQSQIPLERLFSPGYCEIDHIIPFSRSFDDSLSNKILVLGSENQRKGNRTPYEYFGEDSERWNSFEIWVKGSYLNYKKKANLLKKKFSEEEQRDWKARNLQDTKYICRYISNFVNNRLEFKESENKQKVITVNGRATAYLRSRWGLNKVREDGDKHHALDAAVVGVTTQGMVQKISKYSKAHELYTVRKNDEFVDVETGECVDVDEYKEIRKDILPRPWRGFSEELKLRLSDNPLEELKKSPIETYNEEFIKENVKPIFVSRVPFRKISGKLFKETIYSERAFKDGYFVSKKSLVDLKRGDLDNFYNYECDKKLYDAISERMKEFNYNGKKAFESPFRKPTKSGKEGPVVRSVKIKSAVPFKDGIPMNEGLVAKEGMVRIDIYEKEGKYFVVPVYRYQLAKGIVPKRAAIAKKDELKWPIMDQTYNFKFSIYKNDLIEVKYDKKGVYFGYYDGFDRNSASLTIEKHDNSERYRSIGLKVGVLEINKYEVDVLGNYHKVKLGGN

SEQ ID NO: 69 - protein, 1195 aa, Elusimicrobium minutum
MQKNINTKQNHIYIKQAQKIKEKLGDKPYRIGLDLGVGSIGFAIVSMEENDGNVLLPKEIIMVGSRIFKASAGAADRKLSRGQRNNHRHTRERMRYLWKVLAEQKLALPVPADLDRKENSSEGETSAKRFLGDVLQKDIYELRVKSLDERLSLQELGYVLYHIAGHRGSSAIRTFENDSEEAQKENTENKKIAGNIKRLMAKKNYRTYGEYLYKEFFENKEKHKREKISNAANNHKFSPTRDLVIKEAEAILKKQAGKDGFHKELTEEYIEKLTKAIGYESEKLIPESGFCPYLKDEKRLPASHKLNEERRLWETLNNARYSDPIVDIVTGEITGYYEKQFTKEQKQKLFDYLLTGSELTPAQTKKLLGLKNTNFEDIILQGRDKKAQKIKGYKLIKLESMPFWARLSEAQQDSFLYDWNSCPDEKLLTEKLSNEYHLTEEEIDNAFNEIVLSSSYAPLGKSAMLIILEKIKNDLSYTEAVEEALKEGKLTKEKQAIKDRLPYYGAVLQESTQKIIAKGFSPQFKDKGYKTPHTNKYELEYGRIANPVVHQTLNELRKLVNEIIDILGKKPCEIGLETARELKKSAEDRSKLSREQNDNESNRNRIYEIYIRPQQQVIITRRENPRNYILKFELLEEQKSQCPFCGGQISPNDIINNQADIEHLFPIAESEDNGRNNLVISHSACNADKAKRSPWAAFASAAKDSKYDYNRILSNVKENIPHKAWRFNQGAFEKFIENKPMAARFKTDNSYISKVAHKYLACLFEKPNIICVKGSLTAQLRMAWGLQGLMIPFAKQLITEKESESFNKDVNSNKKIRLDNRHHALDAIVIAYASRGYGNLLNKMAGKDYKINYSERNWLSKILLPPNNIVWENIDADLESFESSVKTALKNAFISVKHDHSDNGELVKGTMYKIFYSERGYTLTTYKKLSALKLTDPQKKKTPKDFLETALLKFKGRESEMKNEKIKSAIENNKRLFDVIQDNLEKAKKLLEEENEKSKAEGKKEKNINDASIYQKAISLSGDKYVQLSKKEPGKFFAISKPTPTTTGYGYDTGDSLCVDLYYDNKGKLCGEIIRKIDAQQKNPLKYKEQGFTLFERIYGGDILEVDFDIHSDKNSFRNNTGSAPENRVFIKVGTFTEITNNNIQIWFGNIIKSTGGQDDSFTINSMQQYNPRKLILSSCGFIKYRSPILKNKEG

SEQ ID NO: 70 - protein, 1101 aa, Akkermansia muciniphila
MSRSLTFSFDIGYASIGWAVIASASHDDADPSVCGCGTVLFPKDDCQAFKRREYRRLRRNIRSRRVRIERIGRLLVQAQIITPEMKETSGHPAPFYLASEALKGHRTLAPIELWHVLRWYAHNRGYDNNASWSNSLSEDGGNGEDTERVKHAQDLMDKHGTATMAETICRELKLEEGKADAPMEVSTPAYKNLNTAFPRLIVEKEVRRILELSAPLIPGLTAEIIELIAQHHPLTTEQRGVLLQHGIKLARRYRGSLLFGQLIPRFDNRIISRCPVTWAQVYEAELKKGNSEQSARERAEKLSKVPTANCPEFYEYRMARILCNIRADGEPLSAEIRRELMNQARQEGKLTKASLEKAISSRLGKETETNVSNYFTLHPDSEEALYLNPAVEVLQRSGIGQILSPSVYRIAANRLRRGKSVTPNYLLNLLKSRGESGEALEKKIEKESKKKEADYADTPLKPKYATGRAPYARTVLKKVVEEILDGEDPTRPARGEAHPDGELKAHDGCLYCLLDTDSSVNQHQKERRLDTMTNNHLVRHRMLILDRLLKDLIQDFADGQKDRISRVCVEVGKELTTFSAMDSKKIQRELTLRQKSHTDAVNRLKRKLPGKALSANLIRKCRIAMDMNWTCPFTGATYGDHELENLELEHIVPHSFRQSNALSSLVLTWPGVNRMKGQRTGYDFVEQEQENPVPDKPNLHICSLNNYRELVEKLDDKKGHEDDRRRKKKRKALLMVRGLSHKHQSQNHEAMKEIGMTEGMMTQSSHLMKLACKSIKTSLPDAHIDMIPGAVTAEVRKAWDVFGVFKELCPEAADPDSGKILKENLRSLTHLHHALDACVLGLIPYIIPAHHNGLLRRVLAMRRIPEKLIPQVRPVANQRHYVLNDDGRMMLRDLSASLKENIREQLMEQRVIQHVPADMGGALLKETMQRVLSVDGSGEDAMVSLSKKKDGKKEKNQVKASKLVGVFPEGPSKLKALKAAIEIDGNYGVALDPKPVVIRHIKVFKRIMALKEQNGGKPVRILKKGMLIHLTSSKDPKHAGVWRIESIQDSKGGVKLDLQRAHCAVPKNKTHECNWREVDLISLLKKYQMKRYPTSYTGTPR

SEQ ID NO: 71 - protein, 1187 aa, Bifidobacterium longum
MLSRQLLGASHLARPVSYSYNVQDNDVHCSYGERCFMRGKRYRIGIDVGLNSVGLAAVEVSDENSPVRLLNAQSVIHDGGVDPQKNKEAITRKNMSGVARRTRRMRRRKRERLHKLDMLLGKFGYPVIEPESLDKPFEEWHVRAELATRYIEDDELRRESISIALRHMARHRGWRNPYRQVDSLISDNPYSKQYGELKEKAKAYNDDATAAEEESTPAQLVVAMLDAGYAEAPRLRWRTGSKKPDAEGYLPVRLMQEDNANELKQIFRVQRVPADEWKPLFRSVFYAVSPKGSAEQRVGQDPLAPEQARALKASLAFQEYRIANVITNLRIKDASAELRKLTVDEKQSIYDQLVSPSSEDITWSDLCDFLGFKRSQLKGVGSLTEDGEERISSRPPRLTSVQRIYESDNKIRKPLVAWWKSASDNEHEAMIRLLSNTVDIDKVREDVAYASAIEFIDGLDDDALTKLDSVDLPSGRAAYSVETLQKLTRQMLTTDDDLHEARKTLFNVTDSWRPPADPIGEPLGNPSVDRVLKNVNRYLMNCQQRWGNPVSVNIEHVRSSFSSVAFARKDKREYEKNNEKRSIFRSSLSEQLRADEQMEKVRESDLRRLEAIQRQNGQCLYCGRTITFRTCEMDHIVPRKGVGSTNTRTNFAAVCAECNRMKSNTPFAIWARSEDAQTRGVSLAEAKKRVTMFTFNPKSYAPREVKAFKQAVIARLQQTEDDAAIDNRSIESVAWMADELHRRIDWYFNAKQYVNSASIDDAEAETMKTTVSVFQGRVTASARRAAGIEGKIHFIGQQSKTRLDRRHHAVDASVIAMMNTAAAQTLMERESLRESQRLIGLMPGERSWKEYPYEGTSRYESFHLWLDNMDVLLELLNDALDNDRIAVMQSQRYVLGNSIAHDATIHPLEKVPLGSAMSADLIRRASTPALWCALTRLPDYDEKEGLPEDSHREIRVHDTRYSADDEMGFFASQAAQIAVQEGSADIGSAIHHARVYRCWKTNAKGVRKYFYGMIRVFQTDLLRACHDDLFTVPLPPQSISMRYGEPRVVQALQSGNAQYLGSLVVGDEIEMDFSSLDVDGQIGEYLQFFSQFSGGNLAWKHWVVDGFFNQTQLRIRPRYLAAEGLAKAFSDDVVPDGVQKIVTKQGWLPPVNTASKTAVRIVRRNAFGEPRLSSAHHMPCSWQWRHE

SEQ ID NO: 72 - protein, 166 aa, uncultured Termite
MNKVQEIEYKKIREKLADREYRIGLDLGVGSIGYVVVSLKECNDLSYLPEDIILSGSRIFKSSIGAVERREFRLQRNSHRHHRERMRFLWQLLAEKQLALQSSKDLEKKENSADCETSQKRFPINILKEDPYILRYKALEEKLSLFQLGYVLYHIANHSNTAYENT

SEQ ID NO: 73 - protein, 1032 aa, uncultured Termite
MLYHIANHRGTDSVRSFLEYDDDKIKENTLTAKIAKETKKVIDAKKYRTFGEYLYKGKIEKFQQNIRKKVSNRKTPANKNKEFAVTRDVIIKETEKILASQKQYYTYILTDEYIKKIKDAISYQTEKLIPESGYCPYFKDEKRLPRSHKLNEYRRMYEALNNAKYFDPVLDENTGEILSYQEKEFSREEKKILFDEVLLKGMELTESGAKKLLYHLPDGCEVQLQGRDKTTQKIKGYALVDLEASPFWLRLSQQQQDEFLYDWNSLPLEKLKPKLTNYYSLTESEVDETFQEIKLPSNYASVGKKAMEILLTYIKDGCSYTEALEKAVSEGKLKVDKQTMIYDSLPYYGKILKESTQKLIGKAFSKQFADRNYKEPDTNKNEREFGKIANPVVHQTLNELRKLINEIITVFGKKPLEIGLETTRELKKSKKNREYLSKQQNKNEYARNRIYKEYIEPHLSQIKSRQENPSKYISKFELLEEQNFICPFCSEKITPDDIINSKVDVEHIFPIEESEDITKNNLVIAHNECNADKGKKSPFDAFGDKTSGKYRWNCILHNAQKNLPHKVWRFYQGSLEKFLENKPMSRRFGTDNSYISKIAARYLACLFNDPYHSEIFCIKSSLIAQLRIAWDLNSIMVPLVKNILSEKELEEFKISKNKKIRIDNRHHALDAIVIAYANRGYHNFLNRIHAKEYKINYREKSWLSKILLPPLNRDLEDFKISVKDSIEKANVSIKHDHNTNGSLVKATAYKVYYSGAGEYIITTSKNVEEISFKEKEDPKDTLYRALCKFECRDIDIKDEKLIKKLKYNSTLYKKVQNNLSKAKQELEQDNKKTEEEGKKSQKITEVRIYKKACSLVKGQYIQCGSRLKDKFFAVKEPTEIKTGLGYDTGDNLFLDLYYDKTGKLCGEIIRKVNFNRNKPNYQKEGYTLFERIYQSDILEVDTSEDRISLKNKTGSAPSDRTFIKVNTFTEVNAYFDGKRDKIQIFFGNLLKSSFKNDSFFISSMQKYNVRKVILTSLGIIKYRSQILKNKEV

SEQ ID NO: 74 - protein, 1032 aa, uncultured Termite
MKKRILGLDIGIASVGWALVEFDDEFQDNKKKGTIIKSGVRIFTRAETPKERESLAKPRREARSQRRRIRRRVERLNSIRELFVKNGVVEEWSVSKKNPNNIYITLNQIKTPWQLRMESLDRKLTNEQFAVVLTHLAKHRGYKSLRKDDKAGKVLEAISQNKKRLNDSDYRTLGEMFCKNESYKEHKRNKGGEYINSVARELIEEEVEKIFVKQREKGNNFADVNTEREYLKIAFSQKPAGSISKMVGFCTFENGEKRAPRDSYSAELFKVLCTINNTTFTDMKTGEIRSFSKEEIGKTLETVKNVKDVKYAKIRKDLGLEDSVKFSGVDYRENAKSKGEGEIFVSMKTYHEIKSKIEKLSKEKWDNLKGNTELLDSIVNIIANLKDDESIKKEFQKLKIDEDIIDVLLNFEFKKFINLSFKALRKIIPFQFQGQKYITASTSAGYSLKQEGIKNKLVPPAKENINVAVVARAFAQTRKVINAVIRKYGQFDQINIELATELKNSKFDRSKIEEGQKKFQSQKDKIFKEVQELRGGMTPSSSLLLKYRLWREQDERCVYSGRKISFEDLLDTGFLDIDHIIPYSKSMDDSFNNKVLCLAEENRNKKNDIPFNYYQRIDRDWNLLISIITSMKNMKIAKKSRLLKQELSDIEGFIERNINDTRYATRYIKDFLENNLEFKENEFIKVKVQARSGGLTSVLSYNWGMSKDREESYFHHAKDAIIVACSTQGMVQYISKISQQYENDKDKMKKIKDKTENCIPKPWDSFRADVEESIEGIFVSFAPRHKVTGSAHKETIYSKKHLEKERYVTVKKSLDKIKLSDLENIPCNENCGIIRVLKERLEKFKNDSLKAFADPVHMPTKCPNKKGPVIRSVKIKESNKTGIEVRKGLAERGEMVRVDVFIKDKKYYLVPIYVSDFKNKDLPNKAIAALKLENEWIMIDKTYSFKFSLFKDDLIKIKKKKEEIFGYFGGVHRSTGTIKIKSRHKPKEIDEGIGSRCLLDFRKFQVDVLGNYTEVKHEKRMPAYITRKDKKH

SEQ ID NO: 75 - protein, 1361 aa, Lactobacillus casei
MTKLGKPYGIGVDIGSNSIGFAAVDENSHLIRLKGKTVIGARLFEEGKAAADRRASRTTRRRLSRNRWRLSFLRDFFESHITPTGPNFFMRQKYSEISPKDKARYKYEKRLFNDRTDAEFYQQYPTMYHLRNRLLTDPSKADVREIYFAIHHILKSRGHFLTSGYAKDFNTNKVALNEIFPALQDAYAQVYPDLDITFDENKVNEFKTVLLNEKATPSDTQRALVNLLLAEDGDKDILKQQKQVLTEFAKAVVGLKTKLNVALGTEVDSSEATVWNFSLGQLDDKWAGIESAMTDEGTEILDQIRDLYRARLLNGIVPAGKTLSQAKVDDYAQHHEDLELFKDYLKQLEDDGTAKAIRQLYDRYIDGDDAKPFVREDFVKALTKEVTAHPNAKSPELLERLAQPDFMLKQRNKANGAIPVQMQQRELDQIIKNQSVYYDWLAAPNPVEKHRKSMPYQLDELLNFRIPYYVGPLVTAKEQKAAQGGVFAWMVRKDPDGNITPYNFDEKVDREASANTFIQRMKTTDTYLIGEDVLPKQSLLYQRYEVLNELNNVRVNNEKLSIEQKQQVIRELFERHNSVTIKQFAENLRAHGDYAHIPEIRGLADEKRFLSSLSTYRQLKSLLPDAIDDPAKQADIENIIAWSTVFEDAAIFKTKLKEINWLDSQTITKLSNIRYRGWGQFSHKFLNGLTLGNGHTIIQELFLSNNNLMQILTDETLQKKMTELNADKLKAANINDAIDDAYTSPSNKKALRQVLRVIEDIKRAADGQDPSWLYVETADGGGTPGKRTRARQHQLQEIYANAAHELIDSAVRGELEDKIADKADFNDRLVLYFMQGGRDIYTGTPLNIDQLSSYDIDHILPQSLIKDNSLDNRVLVHAIINREKNATFASTIYAQKMNATWRQWHEAGLISGRKLRNLQMRPDQIDKYASGFVARQLVETRQIIKLTEQIVAAQYPETKIIAVKAGLSHQLREELEFPKNRDVNHYHHAFDAFLAARIGTYLLKRFPNLQAFFTYGKFKKADVKKLRGFNFIRDITHAEDKIVVKDTGEVIWDKKRDVDELDRIYNFKRMLITHEVHFEKADLFKQTVYGAKDSKEAGGKKQLISKKKGYPVDIYGGYTQETGSYLSVVRLTKKAMYAVVKVSTRDAAKLAVAKSISEQKENETLNDIIDEKLSKISKNGKITHELFEVVLPRVGQKTLFKNSKYNLFLVNSDTYMHNYQELWMPREYQKMWKDISLSKYGDAQTEDQLDQIFGFIVSQVNSYFNLYDINQFRKKLNDAADKFATLPMRDTDDMQGKIATIGQLLIGLQANAARSDLRNLDIKTPLGLLQIPNGISLDSDTSVVYQSPTGLLEREVHLSDL

SEQ ID NO: 76 - protein, 1348 aa, Streptococcus equi
MKKPYTIALDIGTNSVGWVVVTDDYRVPTKKMKVLGNTERKTIKKNLIGALLFDSGDTAEGTRLKRTARRRYTRRKNRLRYLKEIFTEEMAKVDDGFFQRLEDSFYVLEDKEGNKHPIFANLADEVAYHKKYPTIYHLRKELVDNPQKADLRLIYLAVAHIIKFRGHFLIEGTLSSKNNNLQKSFDHLVDTYNLLFEEQRLLTEGINAKELLSAALSKSKRLENLISLIPGQKKTGIFGNIIALSLGLTPNFKANFGLSKDVKLQLAKDTYADDLDSLLAQIGDQYADLFLAAKNLSDAILLSDILTESDEITRAPLSASMVKRYREHHKDLVTLKTLIKDQLPEKYQEIFLDKTKNGYAGYIEGQVSQEEFYKYLKPILARLDGSEPLLLKIDREDFLRKQRTFDNGSIPHQIHLEELHAILRRQEVFYPFLKDNRKKIESLLTFRIPYYVGPLARGHSRFAWVKRKFDGAIRPWNFEEIVDEEASAQIFIEKMTKNDLYLPNEKVLPKHSLLYETFTVYNELTKVKYATEGMTRPQFLSADQKQAIVDLLFKTNRKVTVKQLKENYFKKIECWDSVEITGVEDSFNASLGTYHDLLKIIQDKDFLDNPDNQKIIEDIILTLTLFEDKKMISKRLDQYAHLFDKVVLNKLERHHYTGWGRLSGKLINGIRDKQSGKTILDFLKADGFANRNFMQLIHDSELSFIDEIAKAQVIGKTEYSKDLVGNLAGSPAIKKGISQTIKIVDELVKIMGYLPQQIVIEMARENQTTAQGIKNARQRMRKLEETAKKLGSNILKEHPVDNSQLQNDKRYLYYLQNGKDMYTGDDLDIDYLSSYDIDHIIPQSFIKNNSIDNKVLTSQGANRGKLDNVPSEAIVRKMKGYWQSLLRAGAISKQKFDNLTKAERGGLTQVDKAGFIQRQLVETRQITKHVAQILDSRFNTEFDDHNKRIRKVHIITLKSKLVSDFRKEFGLYKIRDINHYHHAHDAYLNAVVAKAILGKYPQLAPEFVYGDYPKYNSFKERQKATQKMLFYSNILKFFKDQESLHVNSDGEEIWNANKHLPIIKNVLSIPQVNIVKKTEVQTGGFYKESILSKGNSDKLIPRKNNWDTRKYGGFDSPTVAYSVLVIAKMEKGKAKVLKPVKEMVGITIMERTAFEENPVVFLEARGYREIQEHLIIKLPKYSLFELENGRRRLLASASELQKGNELFLPVDYMTFLYLAAHYHELTGSSEDVLRKKYFVDRHLHYFDDIIQMINDFAERHILASSNLEKINHTYHNNSDLPVNERAENIINVFTFVALGAPAAFKFFDATIDRKRYTSTKEVLNATLIHQSVTGLYETRIDLSQLGEN

SEQ ID NO: 77 - protein, 1341 aa, Ruminococcus lactaris
MGKGYYVGLDMGTGSVGWAVTDESYQILRRHGKAMWGVRLFESAKTAEERRMFRTGRRRLDRRGWRIEILQEIFAEEISRVDPGFFLRMKESKYYPEDKRDIQGNCPELPYTLFVDKTFTDKDFHKKYPTIYHLRKMLMETEDTPDMRLVYLALHHMMKHRGHFLLSGDISQVTEFKNTFNQFIENIRNEEMDFEIELDESAVQMIEETLKDKNLTRSAKKSKLVKGLNAKNVRDKAFLTLLSGGTVKLSDLFGMEELNEGERPKISFADNGYEEYAAVVEMELGELYYIVESAKAVYDWAILSDILGGSTSVSDAKVRAYEKHKADLKYLKAVVKEYFPKEVYNAVFVESSDKLNNYPAYIGMTKKNGKKVSLEGKRCSREEFMDFLKKNIVVKLPDEEAKMYLQSELEKDSFLPKQVNKDNGVIPYQVHKYELKKILDNLGDKIPFLKENAEKIEKLFSFRIPYYVGPLRTGNGENSKFAWAERKSTEKIYPWNFENVIDVEQSAENFIRRMTNKCTYLIGEDVLPKDSLLYSKFMVLNELNNLRLDGQKISVELKQKIYRDVFCRSRKVTQKKLKSYLIREGIAGKNVELTGIDGDFKGSLTAYHDFKEKLIDVELTQKEKEEIILNIVLFGDDKKLLKQRLKKKFPQLTEKQINTVTALSYKGWGRLSKKLLEEVTVPAPETGEVWNIITALWETNDNFMQLLSKEYQFSDRIEEFNEEKADPEVSYQTIEDLYVSPAVKRQIWQTLQIIQEIEKVMGEKPKRVFVEMAREKQENKRTESRKKTLSDLYTKCKKEEPEWIEALCTSLEKHEEHQLRSDKLYLYYTQKGRCMYSGEPIDLEDLWDNTKYDIDHIYPQSKTMDDSLKNRVLVKKEYNAKKSDTYPIAADIQKKMMPFWKSLLTGGFIPKEKYDRLVRNNPLDANELAGFIERQIVETRQSTKAVAEILKKILPDTEIVYVKAKTVSKFRQDFDFIKVRDMNDLHHAKDAYLNIVVGNVYFVKFTKNAAWFVKENPGRTYNLEKMFIWDVARDGEIAWKAGKSGSIVQVRAMMEKNHILVTRRSYEVKGGLFDQQILKKGKGQVPVKESDERLRDIGKYGGYNKAAGVYFMLVSSKDKKGKEQRTIEFVPIYLKDRVEKDMESARNYLMEERGLREPKILIKKIKIDTLFKVDGFYMWLSGRTSNQLIFKGANQLILSKEDMKTLKKVVKYIQRQKEDKNVKISMRDGITEEELLKLYETFLDKIRHSIYGARLSSQEKTLVNGKEKFIDLSVEAKCQVLYEILHLFQCQSGAANLKMIGGPASAGILVMNNNISKCKNISIVNQSPTGIYEKEIDLLRV

SEQ ID NO: 78 - protein, 1003 aa, Gluconacetobacter diazotrophicus
MIDESLTFGIDLGIGSCGWAVLRRPSAFGRKGVIEGMGSWCFDVPETSKERTPTNQIRRSNRLLRRVIRRRRNRMAAIRRLLHAAGLLPSTDSDALKRPGHDPWELRARGLDKPLKPVEFAVVLGHIAKRRGFKSAAKRKATNISSDDKKMLTALEATRERLGRYRTVGEMFARDPDFASRRRNREGKYDRTTARDDLEHEVHALFAAQRRLGQGFASPELEEAFTASAFHQRPMQDSERLVGFCPFERTEKRAAKLTPSFERFRLLARLLNLRITTPDGERPLTVDEIALVTRDLGKTAKLSIKRVRTLIGLEDNQRFTTIRPEDEDRDIVARTGGAMTGTATLRKALGEALWTDMQERPEQLDAIVQVLSFFEANETITEKLREIGLTLAVLDVLLTALDAGVFAKFKGAAHISTKAARNLLPHLEQGRRYDEACTMAGYDHAASRLSHHGQIVAKTQFNALVTEIGESIANPIARKALIEGLKQIWAMRNHWGLPGSIHVELARDVGNSIEKRREIEKHIEKNTALRARERREVHDLLDLEDVNGDTLLRYRLWKEQGGKCLYTGKAIHIRQIAATDNSVQVDHILPWSRFGDDSFNNKTLCLASANQQKKRSTPYEWLSGQTGDAWNAFVQRIETNKELRGFKKRNYLLKNAKEAEEKFRSRNLNDTRYAARLFAEAVKLLYAFGERQEKGGNRRVFTRPGALTAALRQAWGVESLKKQDGKRINDDRHHALDALTVAAVDEAEIQRLTKSFHEWEQQGLGRPLRRVEPPWESFRADVEATYPEVFVARPERRRARGEGHAATIRQVKERECTPIVFERKAVSSLKEADLERIKDGERNEAIVEAIRSWIATGRPADAPPRSPRGDIITKIRLATTIKAAVPVRGGTAGRGEMVRADVFSKPNRRGKDEWYLVPVYPHQIMNRKAWPKPPMRSIVANKDEDEWTEVGPEHQFRFSLYPRSNIEIIRPSGEVIEGYFVGLHRNTGALIPTPVGPDSYVIA

SEQ ID NO: 79 - protein, 1368 aa, Streptococcus pyogenes
MDKKYSIGLDIGTNSVGWAVITDDYKVPSKKFKVLGNTDRHSIKKNLIGALLFDSGETAEATRLKRTARRRYTRRKNRICYLQEIFSNEIAKVDDSFFHRLEESFLVEEDKKHERHPIFGNIVDEVAYHEKYPTIYHLRKKLADSTDKADLRLIYLALAHMIKFRGHFLIEGDLNPDNSDVDKLFIQLVQTYNQLFEENPINASRVDAKAILSARLSKSRRLENLIAQLPGEKRNGLFGNLIALSLGLTPNFKSNFDLAEDAKLQLSKDTYDDDLDNLLAQIGDQYADLFLAAKNLSDAILLSDILRVNTEITKAPLSASMIKRYDEHHQDLTLLKALVRQQLPEKYKEIFFDQSKNGYAGYIDGGASQEEFYKFIKPILEKMDGTEELLAKLNREDLLRKQRTFDNGSIPHQIHLGELHAILRRQEDFYPFLKDNREKIEKILTFRIPYYVGPLARGNSRFAWMTRKSEETITPWNFEEVVDKGASAQSFIERMTNFDKNLPNEKVLPKHSLLYEYFTVYNELTKVKYVTEGMRKPAFLSGEQKKAIVDLLFKTNRKVTVKQLKEDYFKKIECFDSVEISGVEDRFNASLGTYHDLLKIIKDKDFLDNEENEDILEDIVLTLTLFEDREMIEERLKTYAHLFDDKVMKQLKRRRYTGWGRLSRKLINGIRDKQSGKTILDFLKSDGFANRNFMQLIHDDSLTFKEDLQKAQVSGQGDSLHEHIANLAGSPAIKKGILQTVKVVDELVKVMGRHKPENIVIEMARENQTTQKGQKNSRERMKRIEEGIKELGSDILKEYPVETTQLQNEKLYLYYLQNGRDMYVDQELDINRLSDYDVDHIVPQSFLKDDSIDNKVLTRSDKNRGKSDNVPSEEVVKKMKNYWKQLLNAKLITQRKFDNLTKAERGGLSELDKAGFIKRQLVETRQITKHVAQILDSRMNTKYDENDKLIREVRVITLKSKLVSDFRKDFQFYKVREINNYHHAHDAYLNAVVGTALIKKYPKLESEFVYGDYKVYDIRKMIAKSEQEIGKATAKYFFYSNIMNFFKTEITLANGEIRKRPLIETNGETGEIVWDKGRDFATVRKVLSMPQVNIVKKTEVQTGGFSKESILPKRNSDKLIARKKDWDPKKYGGFDSPTVAYSVLVVAKVEKGKSKKLKSVKELVGITIMERSSFEKDPVDFLEAKGYKEVRKDLIIKLPKYSLFELENGRKRMLASAGELQKGNELALPSKYVNFLYLASHYEKLKGSPEDNEQKQLFVEQHKHYLDEIIEQISEFSKRVILADANLDKVLSAYNKHRDKPIREQAENIIHLFTLTNLGAPAAFKCFDTTIGRNRYKSIKEVLDATLIHQSITGLYETRIDLSQLGGD

SEQ ID NO: 80 - protein, 1504 aa, Bacteroides dorei
MKNIVGLDLGTNSIGWAVVNGSVNDDGSEQLVKIQASGSRIIPMDAAMIGDFNKGNSISQTAERTRLRGVRRLSERYLLRRERLHRILDILGFLPFHFAQDLDRHGKIVKGKEPKLAWRKNEAGQFEFIFQDSFKEMLEDFKLNYPNLITDDKKVPYDWTIYYLRKKGLTSKISKEELAWILLNFNQKRGYYQLRGEEEEENKDKLVEFYALKVVAVEDSGEKKGKDIWYNVHLENGWVYRRTSNMSLDWVGKTKEFIVTTDLEKDGTPKKDKEGNVKRSFRAPKEDDWSLVKKKTEADIDQTHKTVGAYIYDTLLGNPSQKIRGRLVRTIERKYYKEELKLILEKQKEFHLELQDRALYAACIEELYPINEAHRNNVGNRDFTYLFLEDILFYQRPLKSKKSLIDNCPYEENQGLDKETGEIKSFPVKCIAKSHPLFQEFRLWQFIINLRIYRKDLAQDVDVTNELLKTEEDYVALFDWLNGKKEIDQKAFLKYPVFGLKKEIENYRWNYVQDKPYPCNETRSLMLARLEKCDISIEFLTKENEEALWHILYSVEDKNEIVKALQKFADKHDLNASFVDVFQKFPPFKKEYGSYSAKAIKKLLPLMRMGKYWSENSIDKGTRERIDKIITGEYDEKIENRVREKAIHLADVSDFKGLPLWLVCYIVYGRHSEAKEIIQWKSPADIDSYLRSFKQHSLRNPIVEQIIIETLRVVRDIWKQVGNIDEIHVELGREMKNPADKRKKMTQQMSENENTNLRIKYLLTEFLNPEYEVENVRPYSPSQQDILRIYEEGVLNSVSDLPEEISDILKKFTETDLKKRPSRSEVLRYKLWLEQKYRSPYTGEVIPLGKLFTPAYEIEHVIPQSYYFDDSFSNKVICEAEVNKLKSNLLGHEFIVKHHGEIVELPFGKKVRIFTVDEYEQFVKDNYSRTRSKMKKLLMDDIPEEFVTRQLNDSRYISKVVKSLLSNIVREKGEEEAISKNVIPCTGGVTDRLKKDWGINEVWNKIILPRFQRLNELTGTNKFTTKNVGIQEIPTMPLELQKGFNKKRIDHRHHAMDAIIIACANRNIINYLNNKSATAKAELSRYDLQKMLCDKAKTDNNGNYKWVIRKPWASFTQDTYLALENIIVSFKQNLRVINKATNRFLHYNEEGKKIFVKQGKGDNWAIRKSMHKDTVFGEVNLRRIKTVALNEAMKNPQSIVVKDFKRKLLELWNLGFDAKRIKKYFEDNRETWSDINLSKIEVYYFSKDTKDRFFATRKPLDTSFDRKKIENNITDTGIQKILLRHLELKDNNPDIAFSPDGIDEMNRNIIQLNNGKYHQPIIKIRWYEQADKFAVGQTGNKSSKFVEAAKGTNLFFAVYESNILDKKTNTIIKKRNYATIPLNVAIERQKQGLPVAPEDENGNDPIFVLSPNDLVYLPTDDELANGIIAQPLDRGRIYKMVSSSGEQCFFIKHIVANVLVDKFEFSPLNKMERALTGEMIKMICIPIKVDRLGNVLESSSSYKK

SEQ ID NO: 81 - protein, 1426 aa, Capnocytophaga sputigena
MKNILGLDLGITSISFAHIVEDENKEKSEIKELGVRIVSLTTDEQSDFEKGKSITTNANRTLKHGARLNLDRYQQRRKYLIDLLQKANLITSSSILAENGKNTTHSTWQLRAKAVTERIEKEEFARVLLAINKKRGYKSSRKAKTEDEGQAIDGMAIAKRLYDENLTPGQLSLQLLQQNKKLLPDFYRSDLQREFDLVWNFQKQFYPDILTDSFYKELQGKGKDATSKAFSKRYHFDTAENKGSKESVRLQAYQWRAEAISKQLSKEEVAYVLTEINNNLNNASGYLGAISDRSKELYFNRQTVGQYLYAQLQENRHNSLKNKVFYRQDYLDEFERIWETQASFHKELTDELKKQIRDVVIFYQRKLKSQKGLISFCEFESKEIEIEKDGKTITKTIGARVVPKSSPLFQEFKIWQILNNVTCKRKGIRKKKSSAKSTELDLFNEPSQTIFSLDMECKQLLFDELNLKGDLKSDKVLKLLGYSPQEWEINYNQLEGNRTQKALYEAYLKIVEMEAHDVKDILQIKSAKDDWSLDESPLSASEIKEKVKDIFQALGICTKILYFDPLLPVKEFEKQDSYQLWHLLYSYESDDSTSGNETLYRILEKKYAFKREHARILANVALQDDYGSLSTKAIRKIYPNIKENQYSKACELAGYKHSKLSLTTEELEARELKNIIPLLKKNALRNPVVEKILNQMINVVNALIEKNSERDAEGKITKYFHFDEIRIELARELKKNAQKRYEMTQNINKAKLEHQKISEILQKKFGIKNPTKSDIIRYRLYQELEHNGYKELYTNAPIARDMLFSKNIEIEHIVPKARVFDDSFSNKTLTFHRINSNKGEYTAFDYITSLNSEEELNQYLTRVENAYKTKSISLTKYKNLLKKASEIGDGFINRDLRDTQYIAKKAKEILFQVTKNVLSTSGSITDRLREDWGLVDVMKELNMPKYQSLGLTEVEERKEGNKVTVIKNWTKRNDHRHHAMDALTVAFTKPSYIQYLNHLNARKDENNKNYSVILAIEEKETIKVPTNNGKNKRVFIEPIPNFRQVAKKHLEEIFISHKAKNKVVTKNVNKPAGTDKQQITLTPRGQLHKETIYGKYQYYVNKEEKVGVKFDERTITKVSNPLYREALLKRLQANDNDPKKAFTGKNALSKNPIYLDETKTKTLPEKVNLTYLEEDFSIRKDISPDNFKDLKSIEKVIDQGVKRILIKRLQDYDNDPKKAFVDLEKNPIWLNKEKGIAIKRVTISGVSNAQPLHIGKDHLGKTTLNKEGNEIPVDYVSTGNNHHVAIYRDKEGNLQEQIVSFFEAVVRTQQGLPIIDKTYKQEEGWQFLFTMKQNEMFVFPNATTGFNPAEIDLLDPKNKKLISPNLFRVQKIATKDYFFRHHLETNVETDNVLKNTTWKREGLSGLKDIVKVRINHLGDIVSIGEY

SEQ ID NO: 82 - protein, 1443 aa, Parabacteroides johnsonii
MIKLLYLEKLKQYTMKKILGLDLGTSSIGWALVNEAENSDEVSSIIKLGVRVNPLTVDEMQNFEKGKSITTNADRTLKRSMRRNLQRYKLRRDALIELLKKVGFITDKTILSEQGNRTTFETYRLRAKAAEEEISLKELARVLLMINKKRGYKSSRKAKGEEEGALIDGMEIAKKLYDEDLTPGQLCLQLLESGKKFFPDFYRSDLQEEFNKIWDFQKQFNLFSFCDVAKEEVKGKNKSQTWAILAKYFVETKKVNVWNEHEAQTENREEVYKLVGLKRTVKGEELKKENYRWRVQALTEQLDLEKIAVVLQEINGQISASSGYLGAISDRSKVLYFNRQTVGQYQMAELNKNPNMSLRNMVFYRQDYLDEFNVIWEKQAEFHKELTPELKKEIRDIIIFYQRRLKSQKGLISFCEFENREVVVEKEGKKQTKIIGCKVIPRSHPLFQEFKIWQTLNNIEVFVGEKKGKRKKSNVSSDLFGDTEDALITEGRRFLYQEEKKILAKELSIKKGLTKAEILRLLFENPQELDINFKQIDGNQTGFALFSAYSNMIEKYGYEPLDFKKPAEDLISQLKTVFTDLGWNTDLLFIDLDKENKEWEKQPYFRLWHLLYSFEGDNTPTGNGKLIEKIMQLCGIEKEYAIELANVSLQDDYGSLSAKAIKKILLYLKEGNQYDMACEYAGYRHSKSSLTKEEIENKVLKDKLEILPKNSLRNPVVEKILNQMVNVINTVMEVYGRPDEIRVELARELKKSAKEREELTKAVAKNTREHEEIRKVLQSEFGMINVSRNDIIRYKLYEELKDNGYKTLYSNQYIPREKLFSKEIDIEHIIPQSRLFDDSLSNKTLEYKSINIEKGNKTAYDFVKEKYGEEGLQQYLNRCENLCKDKKAKLRKLKMELNEIPDGFIDRDLRNTQYIAKKALSMLTEICRRVVATTGSITDKLREDWQLVDVMKELNLPKYEALGLVEVYEDKDGRKIKRIKDWTKRNDHRHHAMDALTVAFTKDVFIQYFNNKNAAWESDSKEHTNIVGIKTRYFESGKAVPPIPLGQFRVEAKCHLENLLVSIKAKNKVVTTNVNCIKKKGGTYKNTQQTPRGQLHLETIYGSHNQYVTKIEKVNASFDAVKIATVSKQDYRNALLKRLEVFGNDPKKAFTGKNSLEKNPIYLDRAQTIQVPDKVQTVELETAYTIRKPVDPTLNVDKVVDKKIRLILEQRLKEYGGDAKKAFVNLDENPIWLNEEKGISIKRVTIRGISKAQALHDKKDKDGNFILDETGKRIPVDFVNTGNNHHVAIYRKPVLDKKGQVIFDDEGNPMYELDEDVVPFFEAVTRANLGIPIIDKDYKKSEGWQFLFSMKQNEYFVFPNEKTGFNPKEVDLLDPDNYAMISPNLFRVQKIGLNDYTFRHHLETTIQNDLKFITWIRCGKSGIKDIVKVRINHIGQIVSVGEY

SEQ ID NO: 83 - protein, 984 aa, Campylobacter jejuni
MARILAFDIGISSIGWAFSENDELKDCGVRIFTKVENPKTGESLALPRRLARSARKRLARRKARLNHLKHLIANEFKLNYEDYQSFDESLAKAYKGSLISPYELRFRALNELLSKQDFARVILHIAKRRGYDDIKNSDDKEKGAILKAIKQNEEKLANYQSVGEYLYKEYFQKFKENSKEFTNVRNKKESYERCIAQSFLKDELKLIFKKQREFGFSFSKKFEEEVLSVAFYKRALKDFSHLVGNCSFFTDEKRAPKNSPLAFMFVALTRIINLLNNLKNTEGILYTKDDLNALLNEVLKNGTLTYKQTKKLLGLSDDYEFKGEKGTYFIEFKKYKEFIKALGEHNLSQDDLNEIAKDITLIKDEIKLKKALAKYDLNQNQIDSLSKLEFKDHLNISFKALKLVTPLMLEGKKYDEACNELNLKVAINEDKKDFLPAFNETYYKDEVTNPVVLRAIKEYRKVLNALLKKYGKVHKINIELAREVGKNHSQRAKIEKEQNENYKAKKDAELECEKLGLKINSKNILKLRLFKEQKEFCAYSGEKIKISDLQDEKMLEIDHIYPYSRSFDDSYMNKVLVFTKQNQEKLNQTPFEAFGNDSAKWQKIEVLAKNLPTKKQKRILDKNYKDKEQKNFKDRNLNDTRYIARLVLNYTKDYLDFLPLSDDENTKLNDTQKGSKVHVEAKSGMLTSALRHTWGFSAKDRNNHLHHAIDAVIIAYANNSIVKAFSDFKKEQESNSAELYAKKISELDYKNKRKFFEPFSGFRQKVLDKIDEIFVSKPERKKPSGALHEETFRKEEEFYQSYGGKEGVLKALELGKIRKVNGKIVKNGDMFRVDIFKHKKTNKFYAVPIYTMDFALKVLPNKAVARSKKGEIKDWILMDENYEFCFSLYKDSLILIQTKDMQEPEFVYYNAFTSSTVSLIVSKHDNKFETLSKNQKILFKNANEKEVIAKSIGIQNLKVFEKYIVSALGEVTKAEFRQREDFKK

SEQ ID NO: 84 - protein, 1082 aa, Neisseria meningitidis
MAAFKPNPINYILGLDIGIASVGWAMVEIDEDENPICLIDLGVRVFERAEVPKTGDSLAMARRLARSVRRLTRRRAHRLLRARRLLKREGVLQAADFDENGLIKSLPNTPWQLRAAALDRKLTPLEWSAVLLHLIKHRGYLSQRKNEGETADKELGALLKGVADNAHALQTGDFRTPAELALNKFEKESGHIRNQRGDYSHTFSRKDLQAELILLFEKQKEFGNPHVSGGLKEGIETLLMTQRPALSGDAVQKMLGHCTFEPAEPKAAKNTYTAERFIWLTKLNNLRILEQGSERPLTDTERATLMDEPYRKSKLTYAQARKLLGLEDTAFFKGLRYGKDNAEASTLMEMKAYHAISRALEKEGLKDKKSPLNLSPELQDEIGTAFSLFKTDEDITGRLKDRIQPEILEALLKHISFDKFVQISLKALRRIVPLMEQGKRYDEACAEIYGDHYGKKNTEEKIYLPPIPADEIRNPVVLRALSQARKVINGVVRRYGSPARIHIETAREVGKSFKDRKEIEKRQEENRKDREKAAAKFREYFPNFVGEPKSKDILKLRLYEQQHGKCLYSGKEINLGRLNEKGYVEIDHALPFSRTWDDSFNNKVLVLGSENQNKGNQTPYEYFNGKDNSREWQEFKARVETSRFPRSKKQRILLQKFDEDGFKERNLNDTRYVNRFLCQFVADRMRLTGKGKKRVFASNGQITNLLRGFWGLRKVRAENDRHHALDAVVVACSTVAMQQKITRFVRYKEMNAFDGKTIDKETGEVLHQKTHFPQPWEFFAQEVMIRVFGKPDGKPEFEEADTPEKLRTLLAEKLSSRPEAVHEYVTPLFVSRAPNRKMSGQGHMETVKSAKRLDEGVSVLRVPLTQLKLKDLEKMVNREREPKLYEALKARLEAHKDDPAKAFAEPFYKYDKAGNRTQQVKAVRVEQVQKTGVWVRNHNGIADNATMVRVDVFEKGDKYYLVPIYSWQVAKGILPDRAVVQGKDEEDWQLIDDSFNFKFSLHPNDLVEVITKKARMFGYFASCHRGTGNINIRIHDLDHKIGKNGILEGIGVKTALSFQKYQIDELGKEIRPCRLKKRPPVR

SEQ ID NO: 85 - protein, 1021 aa, Clostridium cellulolyticum
MKYTLGLDVGIASVGWAVIDKDNNKIIDLGVRCFDKAEESKTGESLATARRIARGMRRRISRRSQRLRLVKKLFVQYEIIKDSSEFNRIFDTSRDGWKDPWELRYNALSRILKPYELVQVLTHITKRRGFKSNRKEDLSTTKEGVVITSIKNNSEMLRTKNYRTIGEMIFMETPENSNKRNKVDEYIHTIAREDLLNEIKYIFSIQRKLGSPFVTEKLEHDFLNIWEFQRPFASGDSILSKVGKCTLLKEELRAPTSCYTSEYFGLLQSINNLVLVEDNNTLTLNNDQRAKIIEYAHFKNEIKYSEIRKLLDIEPEILFKAHNLTHKNPSGNNESKKFYEMKSYHKLKSTLPTDIWGKLHSNKESLDNLFYCLTVYKNDNEIKDYLQANNLDYLIEYIAKLPTFNKFKHLSLVAMKRIIPFMEKGYKYSDACNMAELDFTGSSKLEKCNKLTVEPIIENVTNPVVIRALTQARKVINAIIQKYGLPYMVNIELAREAGMTRQDRDNLKKEHENNRKAREKISDLIRQNGRVASGLDILKWRLWEDQGGRCAYSGKPIPVCDLLNDSLTQIDHIYPYSRSMDDSYMNKVLVLTDENQNKRSYTPYEVWGSTEKWEDFEARIYSMHLPQSKEKRLLNRNFITKDLDSFISRNLNDTRYISRFLKNYIESYLQFSNDSPKSCVVCVNGQCTAQLRSRWGLNKNREESDLHHALDAAVIACADRKIIKEITNYYNERENHNYKVKYPLPWHSFRQDLMETLAGVFISRAPRRKITGPAHDETIRSPKHFNKGLTSVKIPLTTVTLEKLETMVKNTKGGISDKAVYNVLKNRLIEHNNKPLKAFAEKIYKPLKNGTNGAIIRSIRVETPSYTGVFRNEGKGISDNSLMVRVDVFKKKDKYYLVPIYVAHMIKKELPSKAIVPLKPESQWELIDSTHEFLFSLYQNDYLVIKTKKGITEGYYRSCHRGTGSLSLMPHFANNKNVKIDIGVRTAISIEKYNVDILGNKSIVKGEPRRGMEKYNSFKSN

SEQ ID NO: 86 - protein, 1131 aa, Acidovorax ebreus
MAQHVFGLDIGIASVGWAILGEQRIIDLGVRCFDKAETAKEGDPLNLTRRQARLLRRRLYRRAWRLTQLSRLLKRKGLIADAKLFAKAPSYGDSAWELRRQGLDRLLTPLEWARVIYHQCKHRGFHWTSKAEEAKADSDAEGGRVKQGLAHTKALMQAKNYRSAAEMVLAEFPDAQRNKRGQYDKALSRVLLGEELALLFATQRRLGNPHASDFFEKLILGDGDRKSGLFWQQKPALSGADLLKMLGKCTFEKGEYRAPKASFSVERHVWLTRLNNLRIVVDGRSRPLNEAERQAALLLPYQTETSKYKTLKNAFIKAGLWGDGVRFGGLAYPSQAQIDAEKTKDPEDQFLVKLPAWHELRKAFKAAGHEALWQQISTPALDGDPTLLDQIATVLSVYKDGAEVVQQLRQLALPEPAASIAVLEKISFDKFSSLSLKALRRIVPLMQSGLRYDEAVAQIPEYGHHSQRIEPGAAKHLYLPPFYEAQRKYAGKGDHIGSMQFRDDADIPRNPVVLRALNQARKVVNALIREYGSPIAVNIEMARDLSRPLDERNKVKRAQEEFRDRNDRARSEFERDFGYKPKAAAFEKWMLYREQLGQCAYSQQPLDIQRVLDDHNYAQVDHALPYSRSYDDSKNNKVLVLTHENQNKGNRTAFEYLTSFPDGEDGERWRTFVAWVQGNKAYRMAKRNRLLRKNYGVDESKGFIDRNLNDTRYICKFFKNYVEEHLQLAARADGDTARRCVVVNGQLTAFLRARWGLTKVRGDSDRHHALDAAVVAACTHGMVKALADYSRRKEISFLQEGFPDPETGEILNPAAFDRARQHFPEPWTHFAHELKARLFTDDLAALREDMQRLGSYTTEDLGRLRTLFVSRAPQRRSGGAVHKETIYAQPESLKQQGGVIEKILLTSLKLQDFDKLLNPESNDHFVEPHRNERLYAAIRQRLEQFGGRADKAFGPDNLFHKPDKNNQPTGPVVRSIKLVRGKQTGIPIRGGLAKNDSMLRVDIFTKAGKFHLVPVYVHHRVTGLPNRAIVAFKDEDEWTLIDESFAFLFSVYPNDYVKVTLKKEQQSGYYSGADRSTGAMNLWAHDRAASVGKDGLIRGIGVKTALSVEKFNVDVLGRIYLAPPETRSGLA

SEQ ID NO: 87 - protein, 1122 aa, Streptococcus suis
MSNGKILGLDIGIASVGVGVIDAQTGEIIHASSRIFPSANAANNAERRTFRGSRRLIRRKKHRIKRLDDLFNDFHINLDGEMSTDNPYVLRVKGLSQKLTVEELYISIKNIMKRRGISYLDDAESDNEAGRSDYAKAIERNRQLLTSKTPGEIQLERLEKYGQLRGNFTIIDEEGQSQQIINVFSTSDYVKEVEKILDCQKMYHKFISDEFCDKLIELLREKRKYYVGPGNEKSRTDYGIYRTDGTTLENLFGILIGKCTFYPDQYRSSRASYTAQEFNFLNDLNNLTVPTETKKLSQEQKEFLVNYAKETSVLGAGKILQQIAKLADCKVEDIRGYRLDNKDKPELHTFETYRAMKGLVPLVDIGVLSREQLDILADILTLNTDFEGIREALKKQLPNVFDEKQVKGLASFRKSKSQLFAKGWHNLSQKIMLEVIPELYATSDEQMTILTRLGKFEKSSVAEYPSSINVDEITDEIYNPVVAKSIRQTIKIINASIKKWGEFDQIVIEMPRDRNEDEEKKRIADGQKANAKEKADSILRAAELYCAGKVLPDYVYNGHNQLATKIRLWYQQGERCIYTGQPISIHDLIHNQNQYEIDHILPLSLTFDDSLSNKVLVLATANQEKAQRTPYNYLKSATSAWSYREFKDYVTKRKGIGKKKCEYLTFEEDINGFEVRSKFIQRNLVDTRYASKVILNALQDYFKISGIQTKVSVVRGQFTSQLRHKWGIEKTRETYHHHAVDALIIAASSQLRLWKKQESPLVVDYQEGRQVDLETGEILELTDEQYKELVYQPPYQGFVNTISSSAFDNEILFSYQVDSKVNRKISDATIYATRNAQLGKDKTEGIYVLGKIKDIYTQAGYEAFLKRYTKDKTSFLMYHKDLDTWEKVIEIILRDYREYDEKGKEIGNPFERYRRENGYVKKYSRKGNGTAIKSLKYYDNKLGNHIDITPENSRNAVVLQSLKPWRTDVYFNKETGKYEFLGIKYSDLSFEKGTGEYGISQEKYDSIKIAEGVAKKSIFKFTLYKQDLLFIKDIENNFGKLLRFTSKNDTSKHYVELKPYDKNKFGTEEPLLPVLGNVAKSGQCIKGLNKSNISIYKVRTDILGYRHFIKQEGEHPQLKFKK

SEQ ID NO: 88 - protein, 1509 aa, Bacteroides coprophilus
MKKTLGLDLGTNSIGWAVINSNIDSEGKEKLVGISSCGSRIIPMDATTLGDFGKGNTKSPVAERTRLRGIRRLLERSLLRRERLHRVLSVMGFLPEHYASQLDRYGKFLPETEPKLAWYKDDSGRYQFLFQKSFHEMLEDFRQHQPELVAGEKKIPYDWTIYYLRKKALSQEITKEELAWILLNFNQKRGYYQLRGEEEQEENNKSVEYHALKVVSVEDSGERKGKDIWYNVTLENGWVYRRASNIPLDWTGKVKEFVVTTELDDAGNPKKDKEGNVKRSFRAPKEDDWGLLKTRTQAQIDESGKTVGTYIYESLLCMPNQKIRGKLVRTIERKYYKDELRQILVKQSEFHAALQDHNLLLSCIEELYPNNEAHRRLLSASSFIYFLIEDILFYQRPLKSQKGLIDNCPYESHIYKDKKDGSLHHVPLKCVSKSHPLFQEFRLWQFLSNLRIYQRERMMDGSLKLDVDVTREFLPSEEDYVKLFDWLNERKEISQKFLLAYKPFGLKKNEQANYRWNYVEDKSYPCNETRAEIKSRLSKAGVPEEFLTEEKEEALWHILYSISDKKELTKALGTFAAKNCLNESFVEVFAKIPPFESNYAAYSLKAIRKLLALMRMGKYWNEQAIDRQTRDRIEKILTGEYDETIRSRVREKAMLLTDISSFRGLPLWLACYIVYDRHSESKELVKWETPADIDHFLSKFKQNSLRNPIVEQVITESLRTVRDIWKQEGKIDEIHVELGREMKNPAKERARITAQVQENENTNLRIKALLAEFMNPEFEIENVHPYSPGQQEILRIYEDGVLSGIAEKDLPDDITAILKKFRENDVKKRPTTSEVLRYKLWLEQRYRSPYTGRVIPLGKLFTPAYEIEHVIPQSRYFDDSISNKVICESAVNKLKDNCLGYEFIKKHSGEMVELGNGETVPVFSVEEYERFVKESYFGNSKKMKKLLLEDIPDSFIERQLNDSRYISRVVTSLLSNLVCEEGEQDGLSKNVIVCTGGITDRLKKDWGVQEVWNRIILPRFLRLNEITGRTDFTSTSVNGHLLPALPLYLQKGFNKKRIDHRHHAMDAIVIACANRNIVNYLNNSSARKNSEISRYDLQRLLCEKVKTDANGNYKWILRKPWETFTQDVYAALTNIVVSFKQNLRVINRTTNYYQHYNEAGEKRMIPQTKGDRWAIRKPMHKDTVYGEVNLRKEKTLPLRDVVKNPSIVVDKSLKNKLYELLKSQYDLKAIAKYFETHQDVWADVNLKKIKVYYFTKETNERFFATRKSLDPSFDQKKIEEEVTDTGVQKILLHHLQQNNNDPDMAFSPDGIDRMNQNMTILNDGKWHQPIYKVRTYEKADKFAVGESGNKAKKFVEAAKGTNLFFAVYESVQEDEAIGKQVCKRTFATIPLNEVIKRKKQGLPAAPEDLNGNLPKFVLSPNDLVYLPTEEERNSSRIIQPLDRERIYKMVSSSGSQCFFIKVFVANSIWDKNEYSSLNKMERAITNEMIKEICVPIKIDRLGNVSLIQI

SEQ ID NO: 89 - protein, 1219 aa, Bacteroides cellulosilyticus
MKEEVRGKNRSQTWAILAKFFVWSEKESVWNEKEARTEERVKEYKLVGLKRDTKGNELKLENYRWRVQALSEQLNPEIVAIVLQEINGQISASSGYLGAISDRSKQLYFNRQTVGQYLMSELEKDPNVSLRNRVFYRQDYLDEFDRIWEKQAEFHEELTVELKKEIRDIIIFYQRRLKSQKGLISFCEFEKREVVVEEDGRKKNKTVGCRVIPRSHPLFQEFKIWQTLNDIEVFAWDKQSKRKKADKSSILFDNSEDALLVEGKRFLYQEEKELLAKELFVKESMKKAEVLKLLFENYQELDLNFKQIDGNHTGFALFSAYSKMIEKYGYEPVDFKRSADEIIEKLETIFTNLGWNTELLSIDLSKEDKELERQSYFRLWHLLYSFEGDNTPTGNGKLLEKIMQLCDVEKEYAVELANVSFQEDYGSLSAKAIKKILPYLKEGNQYDVACDYAGYRHSRSSLTKDEIENKILKDKLEILPKNSLRNPVVEKILNQMVNLINTLIDTYGKPDEIRVELARELKKNAKEREELTKSIARNTREHDEIRQLLRTEFGMMNVSRNDIIRYKLYEELKDNGYKTLYSNEYIPREKIFSKEIDIEHVIPQARLFDDSLSNKTLEYRAINIEKGNKTAYDFVKEKYGNDGLEKFLNRCETLFKDKRTKLRKLKMEEKDIPEGFIDRDLRNTQYISKKAFAMLNEISRRVVATTGSITDKLREDWQLVDLMKELNLPKYEKLGMVEMFEDKDGRKIKKITDWTKRNDHRHHAVDALTVAFTKDVFIQFYNNKNAAWMPASKEHANITGIKARYFENGKALAPMPLAQFRAEAKRHLENLLVSIKAKNKVITSNVNRTKNKNGENRKLQQTPRGQLHLETVYGSHRQYATKIEKVNAAFDVTKIATVSKLAYRNALLKRLEAFGNDPKKAFTGKNTLEKNPLYLDENQTEMVPEKVQTVEFETVYTIRKPIDPNLSIDKVVDVKIRSVLEKRLKEYGGDAKKAFVNLDENPIWLNEAKGISIKRVSIRGISNAQSLHEKKDKDGNLILGKEGRKIPVDFVNTGNNHHVAIYKKPVLDKVGQVVLDEEGNPKYELDEVVVSFFDAVTRANLGQPIIDKDYRRSEGWQFLFSMKQNEYFVFPNDKTGFNPKEVDLLNPENYALISPNLFRVQKFAYKNYVFRHHLETTIKDTSSTLKGITWTDFRSSKGLDKIVKVRVDHIGQIVSIGEY

SEQ ID NO: 90 - protein, 1329 aa, Catenibacterium mitsuokai
IVDYCIGLDLGTGSVGWAVVDMNHRLMKRNGKHLWGSRLFSNAETAANRRASRSIRRRYNKRRERIRLLRAILQDMVLEKDPTFFIRLEHTSFLDEEDKAKYLGTDYKDNYNLFIDEDFNDYTYYHKYPTIYHLRKALCESTEKADPRLIYLALHHIVKYRGNFLYEGQKFNMDASNIEDKLSDIFTQFTSFNNIPYEDDEKKNLEILEILKKPLSKKAKVDEVMTLIAPEKDYKSAFKELVTGIAGNKMNVTKMILCEPIKQGDSEIKLKFSDSNYDDQFSEVEKDLGEYVEFVDALHNVYSWVELQTIMGATHTDNASISEAMVSRYNKHHDDLKLLKDCIKNNVPNKYFDMFRNDSEKSKGYYNYINRPSKAPVDEFYKYVKKCIEKVDTPEAKQILNDIELENFLLKQNSRTNGSVPYQMQLDEMIKIIDNQAEYYPILKEKREQLLSILTFRIPYYFGPLNETSEHAWIKRLEGKENQRILPWNYQDIVDVDATAEGFIKRMRSYCTYFPDEEVLPKNSLIVSKYEVYNELNKIRVDDKLLEVDVKNDIYNELFMKNKTVTEKKLKNWLVNNQCCSKDAEIKGFQKENQFSTSLTPWIDFTNIFGKIDQSNFDLIENIIYDLTVFEDKKIMKRRLKKKYALPDDKVKQILKLKYKDWSRLSKKLLDGIVADNRFGSSVTVLDVLEMSRLNLMEIINDKDLGYAQMIEEATSCPEDGKFTYEEVERLAGSPALKRGIWQSLQIVEEITKVMKCRPKYIYIEFERSEEAKERTESKIKKLENVYKDLDEQTKKEYKSVLEELKGFDNTKKISSDSLFLYFTQLGKCMYSGKKLDIDSLDKYQIDHIVPQSLVKDDSFDNRVLVVPSENQRKLDDLVVPFDIRDKMYRFWKLLFDHELISPKKFYSLIKTEYTERDEERFINRQLVETRQITKNVTQIIEDHYSTTKVAAIRANLSHEFRVKNHIYKNRDINDYHHAHDAYIVALIGGFMRDRYPNMHDSKAVYSEYMKMFRKNKNDQKRWKDGFVINSMNYPYEVDGKLIWNPDLINEIKKCFYYKDCYCTTKLDQKSGQLFNLTVLSNDAHADKGVTKAVVPVNKNRSDVHKYGGFSGLQYTIVAIEGQKKKGKKTELVKKISGVPLHLKAASINEKINYIEEKEGLSDVRIIKDNIPVNQMIEMDGGEYLLTSPTEYVNARQLVLNEKQCALIADIYNAIYKQDYDNLDDILMIQLYIELTNKMKVLYPAYRGIAEKFESMNENYVVISKEEKANIIKQMLIVMHRGPQNGNIVYDDFKISDRIGRLKTKNHNLNNIVFISQSPTGIYTKKYKL

SEQ ID NO: 91 - protein, 1152 aa, Roseburia inulinivorans
MNAEHGKEGLLIMEENFQYRIGLDIGITSVGWAVLQNNSQDEPVRITDLGVRIFDVAENPKNGDALAAPRRDARTTRRRLRRRRHRLERIKFLLQENGLIEMDSFMERYYKGNLPDVYQLRYEGLDRKLKDEELAQVLIHIAKHRGFRSTRKAETKEKEGGAVLKATTENQKIMQEKGYRTVGEMLYLDEAFHTECLWNEKGYVLTPRNRPDDYKHTILRSMLVEEVHAIFAAQRAHGNQKATEGLEEAYVEIMTSQRSFDMGPGLQPDGKPSPYAMEGFGDRVGKCTFEKDEYRAPKATYTAELFVALQKINHTKLIDEFGTGRFFSEEERKTIIGLLLSSKELKYGTIRKKLNIDPSLKFNSLNYSAKKEGETEEERVLDTEKAKFASMFWTYEYSKCLKDRTEEMPVGEKADLFDRIGEILTAYKNDDSRSSRLKELGLSGEEIDGLLDLSPAKYQRVSLKAMRKMQPYLEDGLIYDKACEAAGYDFRALNDGNKKHLLKGEEINAIVNDITNPVVKRSVSQTIKVINAIIQKYGSPQAVNIELAREMSKNFQDRTNLEKEMKKRQQENERAKQQIIELGKQNPTGQDILKYRLWNDQGGYCLYSGKKIPLEELFDGGYDIDHILPYSITFDDSYRNKVLVTAQENRQKGNRTPYEYFGADEKRWEDYEASVRLLVRDYKKQQKLLKKNFTEEERKEFKERNLNDTKYITRVVYNMIRQNLELEPFNHPEKKKQVWAVNGAVTSYLRKRWGLMQKDRSTDRHHAMDAVVIACCTDGMIHKISRYMQGRELAYSRNFKFPDEETGEILNRDNFTREQWDEKFGVKVPLPWNSFRDELDIRLLNEDPKNFLLTHADVQRELDYPGWMYGEEESPIEEGRYINYIRPLFVSRMPNHKVTGSAHDATIRSARDYETRGVVITKVPLTDLKLNKDNEIEGYYDKDSDRLLYQALVRQLLLHGNDGKKAFAEDFHKPKADGTEGPVVRKVKIEKKQTSGVMVRGGTGIAANGEMVRIDVFRENGKYYFVPVYTADVVRKVLPNRAATHTKPYSEWRVMDDANFVFSLYSRDLIHVKSKKDIKTNLVNGGLLLQKEIFAYYTGADIATASIAGFANDSNFKFRGLGIQSLEIFEKCQVDILGNISVVRHENRQEFH

SEQ ID NO: 92 - protein, 686 aa, Coprococcus comes
MKKQDSPKNNMGYTAYNLNVLGYEEFAKRVELLFKDTDAVKRLNDSHMQMAEGFDLNALPGSPALRRGVSQAIKVLDDIVSVAGKAPDRIYLKVTRTASNSRKGKRTAKRSDKIKQALKALDADAAADLGAAKLLRELGMFDEKEINERIYLYFHQAGKCLYTGKPIDITRIASNDYYVDHVVPLAYRKDESLDNKVLVYAEASRYKSETLLVSPAVQRKMLPFWRMLRNAGLMSERKLNALIRTEISEGMLKSIIGRQFTENSWEAKLFTAAIAAKYPGTVVIPVKAGVIGAVRSRIGIPKSLKANQFYHAHDALLAAEVGRYMELAKPAFVHNRVKYEQYMRKIKLVNEENKKAPKSQLDFFAGGFFFDRVDKDTGEVYWNKDEEVERIYRACGWKNLRVTYAAFEDGGAFWKQTIYSPREKSKLIATKSDRPAEIYGGYSSQTFANFFVYEVMKKKVKQLRFGAVPAAIASKSDPDTYNAMLEMYARGLAKTAKEKFVRIVRARVLKNTMIELYGERFRIAGEKQVYPVRQMPLAIDEVYLLKGVETIAAAGNAGASAKIDFEKAAESLVGFWDLLLEKLPVNYPKLTVQLKLGLLKHPKDILAATSESEFPAIVYKIAEAEIQVMEQASGLRNMSDTKILGGNTFGGSLVFTFNKVLNDPKSKACFIDTTPAGLYEVKTKIW

SEQ ID NO: 93 - protein, 1105 aa, Actinomyces coleocanis
MDNKNYRIGIDVGLNSIGFCAVEVDQHDTPLGFLNLSVYRHDAGIDPNGKKTNTTRLAMSGVARRTRRLFRKRKRRLAALDRFIEAQGWTLPDHADYKDPYTPWLVRAELAQTPIRDENDLHEKLAIAVRHIARHRGWRSPWVPVRSLHVEQPPSDQYLALKERVEAKTLLQMPEGATPAEMVVALDLSVDVNLRPKNREKTDTRPENKKPGFLGGKLMQSDNANELRKIAKIQGLDDALLRELIELVFAADSPKGASGELVGYDVLPGQHGKRRAEKAHPAFQRYRIASIVSNLRIRHLGSGADERLDVETQKRVFEYLLNAKPTADITWSDVAEEIGVERNLLMGTATQTADGERASAKPPVDVTNVAFATCKIKPLKEWWLNADYEARCVMVSALSHAEKLTEGTAAEVEVAEFLQNLSDEDNEKLDSFSLPIGRAAYSVDSLERLTKRMIENGEDLFEARVNEFGVSEDWRPPAEPIGARVGNPAVDRVLKAVNRYLMAAEAEWGAPLSVNIEHVREGFISKRQAVEIDRENQKRYQRNQAVRSQIADHINATSGVRGSDVTRYLAIQRQNGECLYCGTAITFVNSEMDHIVPRAGLGSTNTRDNLVATCERCNKSKSNKPFAVWAAECGIPGVSVAEALKRVDFWIADGFASSKEHRELQKGVKDRLKRKVSDPEIDNRSMESVAWMARELAHRVQYYFDEKHTGTKVRVFRGSLTSAARKASGFESRVNFIGGNGKTRLDRRHHAMDAATVAMLRNSVAKTLVLRGNIRASERAIGAAETWKSFRGENVADRQIFESWSENMRVLVEKFNLALYNDEVSIFSSLRLQLGNGKAHDDTITKLQMHKVGDAWSLTEIDRASTPALWCALTRQPDFTWKDGLPANEDRTIIVNGTHYGPLDKVGIFGKAAASLLVRGGSVDIGSAIHHARIYRIAGKKPTYGMVRVFAPDLLRYRNEDLFNVELPPQSVSMRYAEPKVREAIREGKAEYLGWLVVGDELLLDLSSETSGQIAELQQDFPGTTHWTVAGFFSPSRLRLRPVYLAQEGLGEDVSEGSKSIIAGQGWRPAVNKVFGSAMPEVIRRDGLGRKRRFSYSGLPVSWQG

SEQ ID NO: 94 - protein, 1361 aa, Anaerococcus tetradius
MGNYYLGLDIGTNSVGWAVTDENYNIERFKKKNMWGIRLFDEAKTAESRRIHRQARRMRQRKIQRLNLLMELFDVEISKVDESFFIRKKESDLHYEDKSQDSRYALFNDKEFNDKDYHNKYPTIFHLIMDLIENDEKKDIRLLYLACHYLIKNRGHFIFEGQKFDVNSSLNNNINKLKSHLDQFYNICLDFDNDKLIEILVNQNLNISEKSKKIKELLRKTNLEVGIANLIAGGSIKLSNMFDDDELKNLDYNSLSFKNSNFDEGRELFEEVLEDRFELVEILKDIHDASVLETMLSSASISPDGGKYISSSMINSYNKHKRDLKLLKKIIKKYKKSEYDNIFRDENIKNNYLSYTRTGINKNKKVQAEDNTDSDGFYKYIVKILKDIKENDSDEDIKYILSEIDKKNFVPKQRTKENSVIPYQLREIELRKIIDNQSKYHKFLNEVDEKGISVKEKIISLLTFRIPYYIGPLNPSYNEEKNFTTSWVKRLAKGKVTPWNFEDMVDIDASREAFIENKLNKCSFLLDETVLPKDSLLYQEYMVLNELNNLKINGQSINTDLKKSIYEELFKKYKKVTRKRLISYIKEKENMSGDIVITGIDGDFKQGLKSYIAFKDIIGEKIDDDIYRKEVEKIIRDISLYGDDKSFIQKKIKNENKLDLSDDQISKIAKLKFKDWGRFSKKLLVGIKASDKNTGEIDNIIGFMRNYNYNIMQLMANVFTFKDEIEKLNSKYYTDEKINIDYLDDLYLSSPAKRMLWQSFQIVDEIKNIKNSDPKKIFIEMARSKEDKPTRKMSRKSRLEKLYTDSKKQFIKLFGPDEYDKLNNEIKNKSESDFRWDNLYLYYTQFGRCMYSLDPIDLEELSNKNLYDQDHIYPKSKIYDDSIENRVLVKKQLNLDKSNEYPIPDRVLNKDKNKLLAFWKMLNEKELIGDKKYARLIRKSPFTDEELGDFIARQLVETRQATKETANMLKRLCPDSKIVYVKAKNVSDFRRKFDILKCRSINDLHHAHDAYLNIVVGNVFDTKFTSNPLNFIKNNSKNRSYNLEKIYDYDVIRNEKIAWLAERKEENQDGSIATVLKNLSKNDIRVTRRTYIKCEDLFDENIVRKGNGKFPIKENNNKSDTNKYGGYSGIKNAYFVLLEDEKHNRILEAIPSFIYKKEKNGEKGSVINYLQNILGIKSAKILRDKIKIGSLLKIDKFPYNLAGKSGNGILISGGVQLILDKNTSKYIKKIENYKYKLDENKDYQINIFDKLSKEENIKLFDLFVDKFENSIYKNRVNIKLKEIKLARPKFEHLSIEEQIKTLTQMLILFGRENNAVNLEYIGLPKNTGKTKINKKINNKDIKIINQSITGLYETEEDLANI

SEQ ID NO: 95 - protein, 1377 aa, Lactobacillus brevis
MESNHDGEQVKYTLGLDIGTSSIGYAAIDKHQKPIRAKGKHVIGVRLFQEGQTAADRRAFRTTRRRLKRRKWRLNLLNRLFDPYLSEVDPNFLPRLRQSNLSPKDDNKHFNGSTLFPDKTDAAFYRQYPTMYHLRYALMTEKRKFDIREVYLAIHHIVKYRGNFLNSATVDSFKTSNIDFTSQFDRLNELYRQVILDEPFQINMDQVDEMTNKLLDNDALKLDTQKQVAKLLPVIYNDKPIDKQYTRIATEFSKAILGYKTKLDVILNLDTQNAKDWVIRLDDEDIDDKLPALVENLDESRQEIVTIIRDLYAQITLNAIVPKGKSLSESMVDKYNDHKDHLDLLMGLIHELGDDSAKGIKLREAYTQYVGKSDDKTLNQDDFYAAIKKNLDEDSKRSPKIQRLIEQASFMPKQRTSANGVIPHQLHQLELDRIIENQGRYYPFLKKPNPNTHKPNGGKYKLDELVAFRIPYYVGPLITKRDQEKTSGADFAWMIRKPGQEGEITPWNFDQKVDRMASANRFIRRMTTKDSYLVAEDVLPDASLIYEKFKALNELNMLKVNDSRLSPSQKQDLFNNLFKKQKTIRTKKLQTYIRTNWELPSVMISGLADPDKFNSSLSTYIDFRDIFGEKVDDPNRQADYEEIIEWSTVFEDRKIYQAKLNQLDWLTEPQRKALLTKRYTGWGRLSKKLLTGLKDQNGDSILDQLWKTNDNFMQIQSRDEFAKQIHDENAKQFHEANNVDDILDDAFTSPQNKKAIRQVDKVVQDVVKAVGYAPDKIAIEFTRSLENNPQRTVSRQRQLQAAYKNIPREIMKSGLMAELGSVADSKKVLSDKLYLYFTQMGKDMYEDKTINIDNLPNYDIDHILPQAFIKDDSIDNRVLISKEENARKSNRVPLKFFGAKRMGFWKDLLNNGLISNRKFQNLTTDPEKISKYSAKGFIHRQLVETSQVIRLVANILGNEYSQAGTTIIEVSAKMNRQLREDFHLIKNRNVNDYHHAMDAYLTAYVGDYLYLRYPKLRPYFVYGDFKKAEDQDLNIRNFNFLHDLKDNESLDKIVDSETGEIVWEKHGSVKQLKKVYHYKFMLVSQEVYTRQDALFNQTIYPASDADKRKLIPIKNSKPVDVYGGYSGNIDAYMAIVRVHGKKEDNYKVVGIPMRAVTKLKKAEKEGHDSYLNAVHEVLKPQFTKKKKNRKTGEITETVDEFDVLLGKVYYRQLIVDGNKKFMLGSSSYQYNAKQLVLSDKAMQVLSKNGKVKSQDENQNLIDVYDEILEKVDQYFELYDQRHYRESLHKGRGIFVNLPLSNQYDGSKLTSYGKYETIDAILNGLHANATMSNLRYLGISSPFGKMQASNGLTIDPDSIICYQSPTGLFERQIKLSDL

SEQ ID NO: 96 - protein, 1239 aa, Lactobacillus buchneri
MTEKRKFDIREVYLAIHHIVKYRGNFLNSATVDSFKTSNIDFTSQFDRLNELYRQVILEEPFQINMNQVDKMTNKLLDNDALKLDTQKQVAKLLPVIYNDKPVDKQYTRLATEFSKAILGYKTKLDVILNLDTQNAKDWAIRLDDEDIDDKLPALVENLDESRQEIVTIIRDLYAQITLNAIVPKGKSLSESMVDKYNDHKDHLDLLMGLIHELGDDSAKGIKLREAYTQYVGKSGDKTLNQDDFYAAIKKNLDEDSKRSPKIQRLIEQASFMPKQRTSANGVIPHQLHQLELDRIIENQGRYYPFLKEPNSNTHKPNGGKYKLDELVAFRIPYYVGPLITKQDQEKTSGADFAWMIRKPGQGGEITPWNFDQEVDRMASANTFIRRMTTKDSYLVAEDVLPDSSLIYEKFKVLNELNMLKVNDRRLSISQKQDLFNNLFKKQKTIRTKKLQTYIRTKWELPSVMISGLSDPDKFNSSLATYIDFRDVFGEKVDDPNRQADYEKIIEWSTVFEDRKIYQAKLNQLDWLTESQSKALLTKHYTGWGRLSKKLLTGLKDQNGDSILDQLWKTNDNFMQIQSRDEFAKQIHDENAKQFHEANNVDDILDDAFTSPQNKKAIRQVDKVVQDVVKAVGYAPDKIAIEFTRSPQDRPQRTFSRQRQLQSTYLNVAKALMKSNLNQELKSVIDSQQTLTDKLYLYFTQLGQDMYTGKEINFDELVNYQIDHILPQAFIKDDSLDNRVLVSAPINNAKSDNVPVKKFGAKMGYFWKQLAENHLISKRKLNNLTTDPDKIGKFTAQGFIHRQLVETSQVIRLVANILGNEYGHDGTTIIEVTAKMNHQMRKDFDLIKIRDVNDYHHAMDAYLTAYVGDYLYLRYPKLRSYFVYGDFKKLKDQSLKIRNFNFLHDLTNDEAGDKIVDQETGEIIWDKHESVKQLKKVYHYKFMLVSQEVYTRQDALFNQTIYPASDADKRKLIPIKNNKPVDVYGGYSGNVDAYMAIVRIHGKKEDKYKVVGVPMRAVADLKKAESKGRDNYLNAVHEVLKPQFTKKKKDRKTGEITEMMDDFDVLLGKVYYRQLIVDGNKKFMLGSSTYQYNAKQLVLSDKAMQVLSKDDKLKNQDENQNLIDVYDEILEKVDQYFELYDINKFRQKLHDGRKKFIELPVDNDFNGKKLISYGKRATIISILNGLHANATMSNLKYLGISSPFGMLQVPNGIILSPASRICYQSPTGLFERKVKLSDL

SEQ ID NO: 97 - protein, 1381 aa, Lactobacillus fermentum
MDYVKEYHIGLDIGTSSIGWAVTDSQFKLMRIKGKTAIGVRLFEEGKTAAERRTFRTTRRRLKRRKWRLHYLDKIFAPHLQEVDENFLRRLKQSNIHPEDPAKNQAFIGKLLFPDLLKKNERGYPTLIKMRDELPVEQRAHYPVTNIYKLREAMINEDRQFDLREVYLAVHHIVKYRGHFLNNASVDKFKVGRIDFDKSFNVLNEAYEELQNGEGSFTIEPSKVEKIGQLLLDTKMRKLDRQKAVAKLLEVKVADKEETKRNKQIATAMSKLVLGYKADFATVAMANGNEWKIDLSSETSEDEIEKFREELSDAQNDILTEITSLFSQIMLNAIVPNGMSISESMMDRYWTHERQLAEVKEYLATQPASARKEFDQVYNKYIGQVPKEKGFDLEKGLKKILSKKENWKEIDELLKAGDFLPKQRTSANGVIPHQMHQQELDRIIEKQAKYYPWLATENPATGERDRHQAKYELDQLVSFRIPYYVGPLVTPEVQKATSGAKFAWAKRKEDGEITPWNLWDKIDRAESAEAFIKRMTVKDTYLLNEDVLPANSLLYQKYNVLNELNNVRVNGRRLSVGIKQDIYTELFKKKKTVKAGDVASLVMAKTRGVNKPSVEGLSDPKKFNSNLATYLDLKSIMGDKVDDNRYQMDLENIIEWRSVFEDGEIFADKLTEVEWLTDEQRSALVKKRYKGWGRLSKKLLTGIVDENGQRIIDLMWNTDQNFMQIVNQPVFKEQIDQLNQKAITNDGMTLRERVESVLDDAYTSPQNKKAIWQVVRVVEDIVKAVGNAPKSISIEFARNEGNKGEITRSRRTQLQKLFEDQAHELVKDTSLTEELEKAPDLSDRYYFYFTQGGKDMYTGDPINFDEISTKYDIDHILPQSFVKDDSLDNRVLVSRAENNKKSDRVPAKLYAAKMKPYWNQLLKQGLITQRKFENLTMDVDQNIKYRSLGFVKRQLVETRQVIKLTANILGSMYQEAGTDIIETRAGLTKQLREEFDLPKVREVNDYHHAVDAYLTTFAGQYLNRRYPKLRSFFVYGEYMKFKHGSDLKLRNFNFFHELMEGDKSQGKVVDQQTGELITTRDEVAKSFDRLLNMKYMLVSKEVHDRSDQLYGATIVTAKESGKLTSPIEIKKNRPVDLYGAYTNGTSAFMTIIKFTGNKPKYKVIGVPTTSAVGLKRVGKPGSESYNQELHRIIKSNPKVKKDFEIVVPHVSYSQLIVDGDCKFTLASDTYQHPATQLVLSKESMEIIADDFKFVKENPATADEQLVRVFDEIVNQMNHYFTIFDQRSNRQKVTKARDKFVSLPTESEYEGAKKTQVGKTEVITNLLMGLHANAAQGDLKVLGLSTFGFFQSSGGLNLSEDAMIVYQSPTGLFERRICLKDI

SEQ ID NO: 98 - protein, 1306 aa, Sphingobacterium spiritivorum
MKHILGLDLGTNSIGWALIKQNFENKQGEILGMGSRIIPMGAELSKFEQGQAQTKNANRRIARGTRKLNKRYKQRRNKLIYILQGLGMLPDQIKLVNQFSDPNKLDKISILPISKNQQQLTAFDLLELRVKALTEKIELEELGKVIYKYNQLRGYSGGNSEPEKEENNEDESEENEKTNDSFVVFSKVLSLGLPEEITFKGKKLSKRKIAIETEDGIIEAETFLDSLKENDSLELHVNIRRAKSGDTITIKLPSKTSWRKKMENIEKQLADKSKELGREYFISELLFDILKENKWAKIRNNVILRSRYESEFDAVWSEQSKYYPILNHLETDRLQKILEFIFPGQKESQEKLRQTGLKEGLKYVIKNQVVFYQRELKDQSDLISNCRYEPTEKVVAKSHPVFQEYKIWEQINKLVINTKIENGVNRKGEIRYKYIDKPIPVALKEWLYEELQSKKEVSFNPILTKLKKEFKLRENVDFLNGMNAKDKLKGNETKVILQKALGELWNIFGLDDSERQVELWEILYNGKGNEYDLTSERTSNILAFIEKYSPDLENKNDVAIKISKIKFSRNYSNLSLKAIDNILPLVRAGKFFDQNFSEALSHKIVKLLNENVEDPFEKSAQEFLDKNQDVLSDGGIVNAIATILVYDKHTAKEYSGDELIKEFTQISRLKQGELRNPLAEQIINEALVIVRDIWRKYGFKPDEIRVELARELKNNAVERGKMYSANLKSQKHNAEIRNKLIELKQEISIANIEKYKLWVSQENLQEVYLKNYNDPSKSEIEKLKLWESQGHISPYTGQPISLSELFNRERYDVDHIIPQSRYFDDSLSNKVICEKSINNEKGNRTSMEYFEVGSVNYRIFTKDQFIDHANKYFSGKKRKNLLATSIPEDPIQRQIKDTQYISIRIREELNKIVGNENVKTTTGGITDYLRNHWGLTDKFKVLLKERYEAVLPKIAQLEYDNYKKETEKKFTEYKNADVEFNEPILDEEIFIEKFRSEFIRKKNNKLIIKGWSKRIDHRHHAMDALVIACTQPAHIKRLNDLNQVLKEWLDKNKEKFFPGFSGTKTELLDEVLNLEEEKRREIFNQLEKFRAIEMPWKGFPEEAEQKLKEVIVSHKPKDKLLLQYDIQGNKQIKLRGQLHEGTLYGLSNGKEIYRIPINKLAGKQFATEKTIEKIVNPFLKNVIEEHLKSFGKKEEAFSAEGILDLNKKLAERKDEQQNPKPHPPISTIKIYYKDPSKSKKKKTDDEDDISLQKLNRKKSFNDSLYVKTGDNYLFAVMEKEVFNKKLNKDKTERHYDLKLFLTLLIF

SEQ ID NO: 99 - protein, 1358 aa, Acidaminococcus sp.
MGKMYYLGLDIGTNSVGYAVTDPSYHLLKFKGEPMWGAHVFAAGNQSAERRSFRTSRRRLDRRQQRVKLVQEIFAPVISPIDPRFFIRLHESALWRDDVAETDKHIFFNDPTYTDKEYYSDYPTIHHLIVDLMESSEKHDPRLVYLAVAWLVAHRGHFLNEVDKDNIGDVLSFDAFYPEFLAFLSDNGVSPWVCESKALQATLLSRNSVNDKYKALKSLIFGSQKPEDNFDANISEDGLIQLLAGKKVKVNKLFPQESNDASFTLNDKEDAIEEILGTLTPDECEWIAHIRRLFDWAIMKHALKDGRTISESKVKLYEQHHHDLTQLKYFVKTYLAKEYDDIFRNVDSETTKNYVAYSYHVKEVKGTLPKNKATQEEFCKYVLGKVKNIECSEADKVDFDEMIQRLTDNSFMPKQVSGENRVIPYQLYYYELKTILNKAASYLPFLTQCGKDAISNQDKLLSIMTFRIPYFVGPLRKDNSEHAWLERKAGKIYPWNFNDKVDLDKSEEAFIRRMTNTCTYYPGEDVLPLDSLIYEKFMILNEINNIRIDGYPISVDVKQQVFGLFEKKRRVTVKDIQNLLLSLGALDKHGKLTGIDTTIHSNYNTYHHFKSLMERGVLTRDDVERIVERMTYSDDTKRVRLWLNNNYGTLTADDVKHISRLRKHDFGRLSKMFLTGLKGVHKETGERASILDFMWNTNDNLMQLLSECYTFSDEITKLQEAYYAKAQLSLNDFLDSMYISNAVKRPIYRTLAVVNDIRKACGTAPKRIFIEMARDGESKKKRSVTRREQIKNLYRSIRKDFQQEVDFLEKILENKSDGQLQSDALYLYFAQLGRDMYTGDPIKLEHIKDQSFYNIDHIYPQSMVKDDSLDNKVLVQSEINGEKSSRYPLDAAIRNKMKPLWDAYYNHGLISLKKYQRLTRSTPFTDDEKWDFINRQLVETRQSTKALAILLKRKFPDTEIVYSKAGLSSDFRHEFGLVKSRNINDLHHAKDAFLAIVTGNVYHERFNRRWFMVNQPYSVKTKTLFTHSIKNGNFVAWNGEEDLGRIVKMLKQNKNTIHFTRFSFDRKEGLFDIQPLKASTGLVPRKAGLDVVKYGGYDKSTAAYYLLVRFTLEDKKTQHKLMMIPVEGLYKARIDHDKEFLTDYAQTTISEILQKDKQKVINIMFPMGTRHIKLNSMISIDGFYLSIGGKSSKGKSVLCHAMVPLIVPHKIECYIKAMESFARKFKENNKLRIVEKFDKITVEDNLNLYELFLQKLQHNPYNKFFSTQFDVLTNGRSTFTKLSPEEQVQTLLNILSIFKTCRSSGCDLKSINGSAQAARIMISADLTGLSKKYSDIRLVEQSASGLFVSKSQNLLEYL

SEQ ID NO: 100 - protein, 653 aa, Oribacterium sinus
MELINSEEFTFKEELEKHTQVAMKQLSEFTYEDLEDSYFSVPVKRMIWQTLLVVREIEKVMGYAPKRIFVEMTRTEEEKGDKGRKESRGNQLLELYKSIKNTDSHNWKEEIAAADKDGKLRSKKLFLYYMQMGRDMYTGEEIDLGRLYDDNLYDIDHIYPRHYVKDDSIMNNLVLVNRRANQDIKKDLYPIPEQIKANPNVHMLWDALHKQKLITDEKYARLTSNTAFSEKQLGDFIARQLVETGQGTKGVADLLEQLFKDTVIVYAKASNVSDFRRDNGFLKSRLVNDFHHAQDAYLNIVVGNVYYTKFTKNPWNFICKDYEKDKEKNRYNLARMFDWNVVRGSETAWIVERKDEKGTISTVRKMMQKNTPLLTRMNFEQHGSIANATLYSAKKAKSENYLPLKTADEKMSDVKKYGGYTSMSIAYYFIVHHKEDKKENVTIEALPLYCKDKVEREENGLEKYCEEVLGYGEVNIIRRKLKIQSLLEFNGYQVHLSGKTGNQLILRNAISLCLSTKWITYIKKLEKAVNIQIVEEVVTPEENIKLYNLLADKHANTVYSKRPNAYGEKLLADREIFVTLEFGKQCEALLQILSLTKIGSTEANLLLIGESEHSGKILISKNLKASDRPAVINQSPCGLYEKKEWIFDKIVEK

SEQ ID NO: 101 - protein, 1436 aa, Capnocytophaga gingivalis
MKYIKYILGLDIGSNSIGWALIQLDLLQKTKRIIAAGSRIIPMDQKVLSDFGKGITISPTAQRTSYRNARHCRERHLLRRERLHRVLHILGFLPTHYDKQIDFSKRYGKFVDNTEPKIAYNEGKFLFMDSFQEMLSDFKSHQPDLFYTKKNGEESKIPYDWTIYYLRKKALSQKISKEELAWIILNFNQKRGYYQLREEEGNKENDFEIISSKIISVIKKDKDKKYNKYWYDIILENGLVYQAAFYNDFVYNWINQDREFIIERTSLKNGAEKVKLSYLPTFDEIDKMDKKEQDKYYKKIKIKTENSIGNKTVGCYIYDHILQNPNEKIKGKLVRTIERKYYKEELKAILEKQIALQPELFTDQLLADCIRELYSKNEAQQRNLAARDFVHLLVEDIIFYQRPLRRQKSTLANCSLESRSYIDKDSHTRKEAPLKVCPKSNPYYQEFRVLQWLQNLKIYEIDSDQEVTHQFIKTLEDKQQLFEFLMAQKEIDCEELLKYFLNQTYPNAKEKALKSELKKWKDTYRWNYVYDIGEKSSKKYPMNETRYELKRHLEKVANLPDDFLSSEVEYLLWHLIYSVKDKVAYEKGLKKFAQKHHLDKDSFVESFKKFNPYPSEYGSFSEKAIRKLLPLMRFGAHWDFNHIDKNTQKRIEDLITGVENEEIRTILREKAEKYQLEKETDFQDLPLWLAQYIVYNRHAEASSLEKWTSVNDLETYLNEFKQHSLRNPIVEQVVMETLRVVRDIWQQYGQGQASFFNEIHIELGRELKKTAKEREKLSKQNQKNEDINLSIKEKLKELEKYNTRAYSITHQEKYKLWLEQKHISPYTGQIISPENLFTDNYEIEHIIPQSRFFDDSLSNKVVCESIVNKAPYKDRQLGLEFIKNQGGRIVKELSKENKTIKIFTEEQYRTFIKEHYSNNPEKTKKLLLEEIPEKMVARQMNDTCYISKFISEILSKIVRSDEQDEGVHSKNVILCTGKITSILRQDWGLNDIWDNLILPRFERMNNLLQKEKFTIYSIEKQKKIPVVPINDQFKSFQKKRIDHRHHAMDAIIIACTTREHINYINNQHALEKEKDKKEKQEERDKLREKLCIKKYNNRSEGNYSWIFKKPWDTFTQEVRVALEDIVVSFKQNLRVINKATNYYERWVEENGKYIKKMVKQEGTNWAIRKPLHEETISGKIYLDREKITKNDILTATRKTVDSSFDDKRIKKITDTGIQKILLNYLKYKGSPEIAFSPEGLEELNKNLSIYNDGKPHKPIYKVRIYEKGSGRFALGEKGRKYKKYVQGASNLYFGIYQGAKRSFATIPLNEVIERQKQGLPSVPEYNEKGDLLLFSLSPNDLVYVPIEGEIIENIDFRNLSKEQKERIYNVNDFSSTCYFTPNRIAKAIFPKEVDLQRKGDKLSGSYDTKTASLEGIQIKEVCIKLKVDRLGNISKA

SEQ ID NO: 102 - protein, 1069 aa, Bacillus cereus
MNYDIGLRIGITSCGWSIINKDLERIEDLGVRVFEKAENPDGTASAAPRREARKSRRKHRRKKHRIERIKRLIVQHDLLSKKELDSLYLSPFNIDVWNLQVEALERKLDNREFARVLIHLVQRRGFQTIRKSVEIQEEGKLLENVSENERIMKVNGYKTVGEMFSKHEKFTHHKRNKDGSYTSVVTRSLLLKEIKTIFNSQRILGNVFSTQKLESDYLYIWGSQRPTLTYEQLMSMVGNCIYEKKEKRAPKTSWAFQYFSLLQKINKLKVSDDNTLRKLSKEERDIVIELAFKKKNVSFVDIRKALKLNDNTKFNHLTYSHVVETKKVEKATFIELKGYHLIKKQLKDRNVELTQELQPKDYDAIAAASTFFKNDIEFRDYLRNQYLDSNGKRKSNIANKVFEDKVIAAVFELNFSKVCHLSFKSLYKLIPHLEKGLDYKEAILCAGYNFRDENKRDKKLFLPVIQQETNPVVHRALTQARKVINAIIREYGSPNTIRFVVANDLAKTYKQRKELESTLKKNRAENEKIKTKLLSMGIINPTGMDIVKYKLWYEQSGICLYTGRQMELSSLFKPGYSIVNHIIPYNRSFDDTYHNRVLTLTETKYEKGNKIPFEYFGAEETCWNEYEKRVSTSKKIHDKKREKLLIRNFDIEYENEMISNNVFDTHYIGSYFEKYIDEHLQFKKSTKKQKVFSIHGNMVAHLHSRWGFNKNSREIYLNHAVDAAIVAVLTDQLIRNIADYYRRDNILEQKGSLKFPEPWKSFSIELEARISPQVRDLIKKLNLDSYLDVDILHIKPVFISKKPRRKVNGEAHKSTIRSLIGINEIGKTVTCIKTRLEDIPFDENGDFPMYGKDTDKYTYTAIKERYLEFNKDKEKAFSTPLYKLKRNGEPGNQIKSVKIIDTRNIVNKVNQGKGIAYNSNIIRVDVFSRDQKYYVVPIYLRDFIKGSLPNKIITAAKGFMQWPETDNSYTFLFSIFPNDLIKVVPKEGKFIKAKNENKENINLTEILGYFKGLDSSTGAFTLESHDGSLLARGIGTKNLLLIEKYQVDVLGRYNKVGNEERQDIKIQQN

SEQ ID NO: 103 - protein, 1391 aa, Lactobacillus jensenii
MKEIKDYIIGLDIGTNSCGYVVTDKQNNILKLKGKTAIGARLFKEGEAAADRRAFRTTRRRLARRRWRLSLLEEIFDEEMNKVDPSFFRRLKESDYSPKDRRKQFNSIVFESSEADKAFYEKYPTIYHLRNALMHDNQKHDLREIFLAVHHIVKYRGNFLREDSVKAFKAAKFTLQGEDGIGPVDKLNDLLKEIYIEAAPELATDNLSKIEDIIKDKKLYKQDKLKQIANLLPKAVDSKDKAKLNKDIAKQVANALMGYMFRLDTLFSFTDVDVKDYKLKFSDANIDESLDALTSLLTDAQIEFVLELQSIYNTIVLNEIVPDGMSLSESMVKKYDDHKKDLKLYKEYIDSLSDQKKAKQLEAAYALYVNYRKADLLAAKKLFEKKKIGDKKFVDVISNFEVFGKFVSDNLDDSELANKIKARLDLGEFLPKQRTNQNGVIPYQLHQVELTQILEKQGKYYPFLITPNPVESHRNNAPYEISELVSFRVPYYVGPLIDNQSIKDKQNKNKFAWMVRQKQGQITPWNFEEMVDTTESANQFIKRMTRKDTYLLAEDVLPKSSLIYQKFMILDELNRIKIDGKKLTSKLKHDIFEKLFKKQKSINLDNLKNYLLAEGNIPGLIEGLSDGINFNNSFSTYIDYRNIFGDEIDNPNKQADFEKMIEWSTVFEDRKIFKRKLKEITWLTPEQIKQVSSKRYSGWGRLSKKLLTQITDENGVNILQRLWNEPETLTEVLANPVIKRKISEANSLFVQINKVENILDDAYTSPQNKKAIRQVIRVVDDIIAAAHGKKPSQIAIEFARSSQNKAKVPDTRKKQLDKIYNKISSEILDSSIKNELKNLKSNKYLSKDKLFLYFKQMGRDAYTGDKLSLDQLQNYDIDHIFPRSFIKDDSLDNRVLTQKPINAKKSDYGIPALEFGNKYVPDLGITVKEMWKLWQENGLISKSKLINLCTNPKKIGSKRASGFINRQLVETSQVIKLVAIILQAEFPDTEIIEVKALQNTTLRESFHLYKNRSVNDYHHAIDAYLTTIVGNYLYQVYPKLRPYFVYGQFKKFNQEKNIDILKRLKNFNFLRQLIFNTDDNIYISGTKEIVFNKKDIIHKLETAYGYKYMNISRECYQETSSLFNQTLYAHNSSVKNSLIPKKKGLPTEIYGGYSGNKDSFFVLVKIVKKRTNLYRIVGIPTRELAKLNSSNNYNQALNKIVESKLCLKETESFKILIKRLLYGTLIVDNGQKFRIGSFKEKHNVQQLVLQLKSMKYIKFYIDGGQNYFTDVERKKLEKQDRDKCLLYVFDDIMNVVNKRFTLFDMSKYEKDGDSLREKFNCLDFNDKVSILSDLLKAFHANSDRTSITKLKITNLGRHQAGKNGITLTTNAQIIYQSPTGLFERRIKIKDL

SEQ ID NO: 104 - protein, 1114 aa, Eubacterium rectale
MNYTEKEKLFMKYILALDIGIASVGWAILDKESETVIEAGSNIFPEASAADNQLRRDMRGAKRNNRRLKTRINDFIKLWENNNLSIPQFKSTEIVGLKVRAITEEITLDELYLILYSYLKHRGISYLEDALDDTVSGSSAYANGLKLNAKELETHYPCEIQQERLNTIGKYRGQSQIINENGEVLDLSNVFTIGAYRKEIQRVFEIQKKYHPELTDEFCDGYMLIFNRKRKYYEGPGNEKSRTDYGRFTTKLDANGNYITEDNIFEKLIGKCSVYPDELRAAAASYTAQEYNVLNDLNNLTINGRKLEENEKHEIVERIKSSNTINMRKIISDCMGENIDDFAGARIDKSGKEIFHKFEVYNKMRKALLEIGIDISNYSREELDEIGYIMTINTDKEAMMEAFQKSWIDLSDDVKQCLINMRKTNGALFNKWQSFSLKIMNELIPEMYAQPKEQMTLLTEMGVTKGTQEEFAGLKYIPVDVVSEDIFNPVVRRSVRISFKILNAVLKKYKALDTIVIEMPRDRNSEEQKKRINDSQKLNEKEMEYIEKKLAVTYGIKLSPSDFSSQKQLSLKLKLWNEQDGICLYSGKTIDPNDIINNPQLFEIDHIIPRSISFDDARSNKVLVYRSENQKKGNQTPYYYLTHSHSEWSFEQYKATVMNLSKKKEYAISRKKIQNLLYSEDITKMDVLKGFINRNINDTSYASRLVLNTIQNFFMANEADTKVKVIKGSYTHQMRCNLKLDKNRDESYSHHAVDAMLIGYSELGYEAYHKLQGEFIDFETGEILRKDMWDENMSDEVYADYLYGKKWANIRNEVVKAEKNVKYWHYVMRKSNRGLCNQTIRGTREYDGKQYKINKLDIRTKEGIKVFAKLAFSKKDSDRERLLVYLNDRRTFDDLCKIYEDYSDAANPFVQYEKETGDIIRKYSKKHNGPRIDKLKYKDGEVGACIDISHKYGFEKGSKKVILESLVPYRMDVYYKEENHSYYLVGVKQSDIKFEKGRNVIDEEAYARILVNEKMIQPGQSRADLENLGFKFKLSFYKNDIIEYEKDGKIYTERLVSRTMPKQRNYIETKPIDKAKFEKQNLVGLGKTKFIKKYRYDILGNKYSCSEEKFTSFC

SEQ ID NO: 105 - protein, 1362 aa, Lactobacillus paracasei
MTKLGKPYGIGVDIGSNSIGFAAVDENSHLIRLKGKTVIGARLFEEGKAAAKRRAGRTTRRRLSRNRWRLSFLRDFFESHITPTDPNFFMRQKYSEISPKDKARYKYEKRLFNDRTDAEFYQQYSTMYHLRNRLMTDPSRADVREIYFAIHHILKSRGHFLTPGDAKDFNTNDVALDEIFPALQDAYAQVYPDLGITFDEDKANEFKTILLNEIATSIDTQRALVKLLLAEEDDKDILKQQKQVLTEFAKAVVGLKTKLNLALGTEVDSSEATAWNFSLGQLDDKWAGIESAMTDEGTEILDQIRDLYRARLLNGIVPTGKTLSQAKVDDYTQHHEDLQLFKAYLKQLEDDGTAKAIRQLYDRYIDGDDAAPFLRENFVKALTKDVTAHPNTKSPELLERLAQPDFMLKQRNKANGAIPVQMQQRELDQIIKNQAVYYDWLAAPNPVEKHRKSMPYQLDELLNFRIPYYVGPLVTAKEQKAAQGGVFAWMVRKDPEGNITPYNFDEKVDREASANTFIQRMKTTDTYLIGEDVLPKQSLLYQRYEVLNELNNVRVNNEKLSIEQKQQVIRELFERHNSVTIKQFAENLRAHGDYAHIPEIRGLADEKRFLSSLSTYRQLKSLLPEAIDDPAKQADIENIIAWSTVFEDAAIFKTKLKEISWLGSEAITKLSNIRYRGWGQFSRKFLNGLTLGNGHTIIQELLLSTNNLMQILTDETLQKKMTELNADKLKTANINDAIDNAYTSPSNKKALRQVLRVVDDIKRAADGQDPSWLYVETADGGGTPGKRTRARQHQLQEIYANAAHELIDTAVRGELEDKISDKADFNDRLVLYFMQGGRDIYTGAPLNIDQLSSYDIDHILPQSLIKDNSLDNRVLVHAIINREKNATFASTIYAQKMNATWRQWHEAGLISGRKLRNLQMRPDQIDKYASGFVARQLVETRQIIKLTEQIVAAQYPDTKIIAVKAGLSHQLREELEFPKNRDVNHYHHAFDAFLAARIGTYLLKRFPNLQAFFTYGKFTKADVKKLRGFNFIRDITHAEDKIVAKDTGEVVWDKQRDVDELDRIYNFKRMLITHEVRFETADLFKQTVYGARDSKEAGGSKQLIPKKKGYPVDIYGGYFRENTAYLAVVKVTKKTETIFKVVKIATSQVAALNKARSRSTAEELSVLTELLKPKFSKVGKNGKITDTPFEVVLPRVPREQLFYNAKYGFFMVNSDTMFHNFQEIWVSRSDQKILQQIRKAKIDYPNVDQDLDNLFHNLADQIVKYFDLYSIAGFKEKISQSQNTFNDLAVDDTDQSVGKITVINELLKGAQANGMTGSLKVLKISTPFGFTQDKSGVLTKDSSIIYQSPTGLFERSVRLTDL

SEQ ID NO: 106 - protein, 1056 aa, Actinobacillus minor
MKALNYILGLDLGIASVGWAVVEIDQNELPIRLIDLGVRTFERAEVPKTGDSLALARRLARSSRRLVRRRAVRLLKAKRLLKQEGILQADDFHSSHLKPLPNNPWELRVKGLNHLLDRKEWAAVLLHLLKHRGYLSQRKNESKTDNKELGALLKGVSENRQLLQAQAFSTPAEIAIKKFQQEEGHIRNQRGAYSHTFDRNDLLAELRLLFQKQREFNNPYTSQSLEQAIAELLMWQKPALSGEAILKMLGKCTFEPSEYKAPKNSYSAEYFVWLTKLNNLRILENGADRGLTAEERQLLINQPFEKAKFTYAQARKLLELSDLAIFKGVRYGKDNAESATLMEMKAWHAIRKALESNGLKTEWNGLKTKPELLDKIGTAFSIYKTDEDISQYLNGELSPAVLNALLENLSFDKFIRLSLQSLAKILPLMEQGLRYDEACKQVYGDHYGKKEQLELRFLPKIPVEDIRNPVVLRTLSQARKVINGVVRLYGSPARIHIETGREVGKSFSERRDISKRQEENRNERQRAVEKFKEFFPHFVGEPKAKDILKMRLYEQQHGKCLYSGKELDLNRLLEKGYVEIDHALPFSRTWDDSFNNKVLVLASENQNKGNQTPYEWLNGKENAERWKLFQALVNGSRFPYSKKQRILTKYLDEDGFRERNLNDTRYVARFLCNFIEDNMQLVGQGKKRVFASNGQITALLRRSWGIQKVREDNDRHHAVDAVVVACSTRALQKKITDYVRYKEMNVFTGEKIDQETGEIIKFHFPEPWKFFRQEVEIRVFSETPAEDVVIALPDRPQANHEFIQPLFVSRAPTRKMTGQGHMETIKSAKRLAEGLSVSRVPLTQLKLKDLENMVNREREKALYEALKVRLEKFNNDPAKAFADPFYKKGGQQVKAVRVEQVQKSGVLVRQENGVADNASMVRVDVFIKGGKYFLVPIYTWQVAKGILPNRAATQGKEEEYWDIMDETAIFQFSLYQNDLIKLVTKKKTIFGYFNGLNRATSNINIKEHDLDKSKGKDGIYLEVGVKLALSLEKYQVDELGKNIQPCRSMKKRPPVR

SEQ ID NO: 107 - protein, 1081 aa, Neisseria flavescens
MTAFKPNPINYILGLDIGIASVGWAMVEIDEEENPIRLIDLGVRVFERAEVPKTGDSLAAARRLARSVRRLTRRRAHRLLRARRLLKREGVLQAADFDENGLIKSLPNTPWQLRAAALDRKLTPLEWSAVLLHLIKHRGYLSQRKNEGETADKELGALLKGVADNAHALQTGDFRTPAELAVNKFEKESGHIRNQRGDYSHTFSRKDLQAELVLLFEKQKEFGNPHISDGLKEGIETLLMAQRPALSGDAVQKMLGYCTFEPTEPKAAKNTYTAERFIWLTKLNNLRILEQGSERPLTDTERATLIDMPYKNKLTYAKARELLGLDDTAFFKGLRYGKDNAESATLMEMKAYHAIRRALEKEGLKDKKSPLSLSPELQDEIGTAFSLFKTDEDITGRLKGCLQPEILDALLKHINFDKFVQISLKALRRIVPLMEQGKRYDEACAETYGDHYGEKNSEEMLYLPPIPADEIRNPVVLRALSQARKVINGVVRRYGSPARIHIETAREVGKSFKDRKEIEKRQEENRKDREKAAAKFREYFPNFVGEPKSKDILKLRLYEQQHGKCLYSGKAIDIRRLNGKGYVEIDHALPFSRTWDDSFNNKVLVLGSENQNKGNRTPYEYLNGKDNSREWLEFKARVETSRFPHSKKQRVLLQKFDEKGFKERNLNDTRYVNRFLCQFVADHMQLTGKGKRRVFASNGQITNLLRGFWGLHKVRAENDRHHALDAVVVACSTVAMQQKITCFVRYKEMNAFDGKTVDKETGEVLHQKTHFPQPWEFFAQEVMIRVFGKPDGKPEFEEADTPEKLRALLAEKLSSRPEAVHEYVTPLFVSRAPNRKMSGAHKDTLRSAKRFVKHNEKISVKRVWLTEIKLADLENMVNYKNGREIELYEALKARLGAYGGNAKQAFDPKDNPFYKKGGQLVKAVRVEKTQESGVLLNKKNAYTIADNGDMVRVDVFCKVDKKGKNQYFIVPIYAWQVAENILPDIDCKGYRIDDSYTFCFSLHKYDLIAFQKDEKSKVEFAYYINCDSSNGRFYLAWHDKGSKEQQFRISTQNLVLMQKYQIDELGKEIRPCRLKKRPPVR

SEQ ID NO: 108 - protein, 1392 aa, Gemella haemolysans
MANKTWYLGLDIGSASVGWAATDTGYKIIRKNKKRLWGVRLFEEAKTAEDRRGYRSSRRRLARRKWRLNLLEELFTSEVKKVDENFFLRLKESQYHYEDKTHKVPYAIFNDKDYTDKDYYKDYPTIYHLRSKLMTEENPDIRKVFLAIHHIIKNRGHFLLQGQSFKDGNLNNLIKELLELDILHVGFEVTEEVVDKIADISLEKKTSKDKLNDIKELYPKEKQLLEVFRLIFGGKTSLDKLFAIDEYKELDAAIKSVSFKEKIYEEVRHDYEQVLSNYIELLDLAKLVYDSIILSDIKKEGKTLSESKVELFEKHRDDLLKLKNLVKNDSKLSEDKKVELYALIFKEDKDKGTNYVNYIRKSEEGKGCNYEDFKKFLVKELAKLEESSVKTEIIKDLELEQFLPLQRTKDNSVVPYQIHKEELVKILDNAARYHSFLNEKDESGYNVREKVIQLLEFRIPYYVGPLNSSKKAKEGGFAWSVRNTGYENTPVTPWNYSKVIDESASAEKFITNLTNKCTYLKGEDVLPKSSLLYSEFALLNELNALKYDGNRISLEARNTIIEKLFKQQGKKVTKTSIKNLLKAEGYIDGKGEITGIDITVKNDLKSYRDFKKILGNKFNSEHVENIILWITLYGESRKLIKAKIESVYGEVYSKDEITKMSRLVYKDWGRFSRKLLTELVSKKLYNEETGECLNIIGAMRQNNILFMELLADRFDYSKQIVEFNKELQEDVTEIAPEILDDLYVSPAVKRSIWQTVRIVEELKKIIGCAPAKIFVETTRSNQEKKKPTDSRKKQLELAYKAVKKDVKELEKEIGTINFDVLNDRLSSVEPSKLKAKKLYLYYTQLGRCMYSEEPINISELFDNNKYDIDHIYPQSKIKDDSFTNTVLVKRESNAAKTDRYPLGSDIQTPSNRRFWKFLKEKGLISDEKYNRLVRTEEFSDEELSGFIARQLVETSQSVKAVASILGELNPETSICYSKAENVSSFRQNFGKIKKGDRDSKNNDQLIKVREINDYHHAKDAYLNVVVGNVYDTKFTRNVFNFIKDKKDGRKYSLNKVFYENVSDSKTVAWEMDKTIHQVEKVMNNNNIMVTRRTSEQKGGLFDATVYKAKVAAKAKDGVYYPLKTSNSVVKDVAKYGGYTSIGIAYYSIFEYTIVNKKGEEKITRIIPIPIYISQNIKDSTALIEFGKSQIFCRAYEKIKDFKLLYRKLCIGSKININNYQYYIGGKSDERFYYDSAIQVTLDKKSEKYLKILSKYQNWKKENKDGELWENITKENNIELYNKLVEKMNSEIFTKKKSNKYNELNSEEIRNNFIKISVEEQAKVLLEILNLLTNKKSIFDLKSIDIKAARGKISFNLTSLIQFSIIEQSITGFYEKEITIIGDKGNDMENNNS

SEQ ID NO: 109 - protein, 702 aa, Helicobacter pullorum
MRKILKIDERIQFKEVDYTAKNPENKKFVEFKNLKKFCEILGAIVGDRALADSIARDMTLIKDEEELAQKLRGYGKFSQEQITQLSALHFSHHISLSLKALSEILPFMREGMRYDEACQEAKLQAKHNDKKSKFLPPFCESIYADELTNPVVHRAIAEYRKILNALIAKYGSVHKIHIELTRDVGKNFQEREKYKKEIESNYKARVQAMQECEKLGLTLSEGNILKLRLFREQNEICVYSGRKITLANLKEQGALEIDHILPYSRSSDDSYMNKVLVFTNENQNKGNKTPYEAFGGDSQKWGEIESLALRSGYPKKKAKRILDKGFGDREAGFKSRNIVDSGYIARLIANYTKEYLKFLPLDSHENTALIAGEKDSKIHVEAVKGMLTATMRHFWGLGSKNRYEHTHHAVDAIIIAYINAAMIQRFSQFRQNQESLKARFYAKELAKEEFKTQRAFFEPFSGFREQVLAKVGQIFVSRPPRKRARGALHEETFYSIDDKKLSETYGGKKGVQRALSLGKIRQIGTKIVANGPMVRVDIFKHTQSGRFYAVPIYTMDFALGILPNKAVVSGKDKDRIIKDWLEMDSCYEFCFSLFKDDVIEVQKRDMEKPELAYFVSLDASDGRIKVRHHCNDITKINENQKKLFSEAIEKEVVGRGSIQNLKVFKKYKVSPLGEIKEAKYEPRQPIALKTSPKKHRKQNNAQ

SEQ ID NO: 110 - protein, 1371 aa, Streptococcus dysgalactiae
MDKKYSIGLDIGTNSVGWAVITDDYKVPSKKFKVLGNTDRHSIKKNLIGALLFDSGETAEATRLKRTARRRYTRRKNRIRYLQEIFSSEMSKVDDSFFHRLEESFLVEEDKKHERHPIFGNIVDEVAYHEKYPTIYHLRKKLADSTDKADLRLIYLALAHMIKFRGHFLIEGDLNPDNSDMDKLFIQLVQTYNQLFEENPINASRVDAKAILSARLSKSRRLENLIAQLPGEKRNGLFGNLIALSLGLTPNFKSNFDLAEDAKLQLSKDTYDDDLDNLLAQIGDQYADLFLAAKNLSDAILLSDILRVNSEITKAPLSASMIKRYDEHHQDLTLLKALVRQQLPEKYKEIFFDQSKNGYAGYIDGGASQEEFYKFIKPILEKMDGTEELLAKLNREDLLRKQRTFDNGSIPHQIHLGELHAILRRQEDFYPFLKDNREKIEKILTFRIPYYVGPLARGNSRFAWMTRKSEETITPWNFEEVVDKGASAQSFIERMTNFDKNLPNEKVLPKHSLLYEYFTVYNELTKVKYVTEGMRKPEFLSGKQKEAIVDLLFKTNRKVTVKQLKEDYFKKIECFDSVEISGVEDRFNASLGTYHDLLKIIKDKDFLDNEENEDILEDIVLTLTLFEDKEMIEERLKKYANLFDDKVMKQLKRRHYTGWGRLSRKLINGIRDKQSGKTILDFLKSDGFANRNFMQLINDDSLTFKEAIQKAQVSGQGHSLHEQIANLAGSPAIKKGILQSVKVVDELVKVMGHKPENIVIEMARENQTTQKGQKNSRERMKRIEEGIKELGSQILKEHPVENTQLQNEKLYLYYLQNGRDMYVDQELDINRLSDYDVDHIVPQSFIKDDSIDNKILTRSDKNRGKSDNVPSEEVVKKMKNYWRQLLNAKLITQRKFDNLTKAERGGLSELDKAGFIKRQLVETRQITKHVAQILDSRMNTKYDENDKLIREVKVITLKSKLVSDFRKDFQFYKVREINNYHHAHDAYLNAVVGTALIKKYTKLESEFVYGDYKVYDVRKMIAKSEQEIGKATAKRFFYSNIMNFFKTEITLANGEIRKRPLIETNEETGEIVWDKGRDFATVRKVLSMPQVNIVKKTEVQTGALTNESIYARGSFDKLISRKHRFESSKYGGFGSPTVTYSVLVVAKSKVQDGKVKKIKTGKELIGMTLLDKLVFEKNPLKFIEDKGYGNVQIDKCIKLPKYSLFEFENGTRRMLASVMANNNSRGDLQKANEMFLPAKLVTLLYHAHKIESSKELEHEAYILDHYNDLYQLLSYIERFASLYVDVEKNISKVKELFSNIESYSISEICSSVINLLTLTASGAPADFKFLGTTIPRKRYGSPQSILSSTLIHQSITGLYETRIDLSQLGGD

SEQ ID NO: 111 - protein, 1007 aa, Helicobacter canadensis
MKVLGFDIGINSIGWAFVENNELKDCGVRLFTKAENPKTKESLALPRRNARSSRVRLRRRRSRLLSLKHIISKEFGLHYEDYIALDGNLPKAYTGKIESIYKLRYEALSQAISKEDLARVILHIAKHRGYMNKNQKTSQDSEKGAILSAIKENSNKIKHYQTAGEYFYKELFENLRDGTKEFKNIRNKAMKNEKTGNMESTYYNTILASDLEKELKLILEKQQAYHNYSDTFIKEVLEIAFYQRPLKDFSHLVGSCTFYENEKRACKNSYSAWEFIALGKIINTLESIKKDTGEIFSNEIITQILKEVLDKGSLSYTKLRKMINLDEKVKFKGLKYDKEGVEKTNLIEFKKLKEFKKALGEHNLERKTLDEIATHITLTKDENQLKKQLEQYALSQNQIDALAELDFNDHINLSFKALYEILPLMEKGKRYDEACNELGLKAKTSNQKSEFLPAFCDSIFAQELTNPIVNRAISEYRKVLNRLLKKYGKMHKIHIELARDAGLSKEARNKIEKEQKENKDINDKAEKTCKEFGLKPNAKNILKIKLWREQGEICAYSGKKITIDDLKEDKALEVDHIYPYSRSYDDSYNNKVLVFIKENQLKLNQTPYEAFGSNQEKWSKIQVLAQKLPYKKKNRILDENFKNKDQIEFISRNLNDTRYATSLIAKYTKEYLEFLPLSDDEDISLKSGEKGSKTHVQTMNGMLTSVLRHAWGFSQKDRNNHLHHALDAIIIAYSTNSIIKAFSDFKKNQEILKAKLYAKKLTSEEYKNQSKFTGFEKYRSKILEKLDSIFVSKPPNKNTKGALHEQTFYSYQDILEEYKTQEGLKRALECGKVRKIGTKYVVNDRMVRLDIFKKDNKFYGIPIYTMDFALGVLPNKVVTIGTDKDKIKKEWKTIDETYEFCFSLYKGDLVLIQKKEMQESEFAYYNGFDISSASISLEKHDNKFENLTENQKLLFPKAKEGDVEVRGIGIQGLKVFKKYMVTPLGEIQETRTEARQNIQPRKKHGLR

SEQ ID NO: 112 - protein, 1397 aa, gamma proteobacterium
MTKNYISPIAIDLGAKFTGVALYQYLEGADCTQEVAKGLLVDDRGNVTWSQEGRRGKRHQVRGYKRRKMAKRLLWLILDSEYGIKREEVTEPLLKFINGLLNRRGYTYISEEVDEESMNVSPLPFSEMMPDYFNSSAPLLEQLAKLLSDKNKLVRFRAEGKIPSNKNEFKKLLDTALDGKYKDEKKELSEAWGNILIASENVLKSTVDGHKSRSEYLANIKEDIKSNEELEKQISSKEIDGFYNLVGHLSNFQLRLLRKYFNDPNMSGVSYWDEKRLEKYFYQWVQGWHTKGGTDEAEKKNIILKTKGAPLLKTLKSLSADLTIPPYEDQNNRRPPKCQSVLLSDEKLTMHYPKWKEWVGQLVKQNDNAYLNENVTLANALHRIVERSRSIDPYQLRLLISITDAEKRNDLAGYKRLKLSLGSEVDEFLLLVKNIVDETKEAREGLWFETENKLFFKCGKTPPRKEKLKSTLLSAVLGKNLSDDEQSSFIEEFWKSGTPKIERRNVRGWCRLASQVQKTYGVYLKEYGLQQLHKLEAGKKLDDKPLALLYKNSGLIASKIGEALNIEPDEVSRFASPHSLAQIFNIIEGDVAGFNKTCRACTYENIWRMQEEKVESLLTNQLLSEIHGERKVPLKSAMCTRLSADSTRPFDGQMASIIEHIARKIAQHKIAQINDVPKEFSIDIPIIIESNQFSFTAELEEIKRGRGSAKAKKAKELGEKSKAGWVSKTERIKTSSEGICPYTGAPLGGSGEIDHIIPRSLTGRTKKTVFNSEANLIYCSSKGNHDKGNRVYVIEQLNDKYLKKQFSTSDVNLIKKKIKTTIQRFTEGGEKLRSFSELSREDQKAFRHALFVPELKSEVTSLLAVKNITRVNGTQAWLAKKIASLLAEHLDKQGRDYTLSAHQIDPWSVSKQRKMLASAEPIWAKKDPQPAASHVVDAVCTFLEALEQPHTASRLKTISSTSFEKTGWRSALIPDLIKVDALDRRPKYRRYNIGSTSLFKDGIYAERFLPILIDENGLMAGYDIDNSLKAKGADVVFESLSPFLLFKGEEVGAQSLSDWQERIDGRYLYMSIDKVKAFDYLQEKVGEKDIAAELLNSIHFTQRKTELRAKFSDDSGKKMKTLDAIRKSLKLTVTVNEIGKRKEKCGFSGTIGIPAKSAWENLLDEPLLETYWGTKMPPQEIWEKVYRKHFPRNIPNQAHRKVRKDFSLPVVDSVSGGFRVKRKTPNGYNYQLLAIDGYSAVGFKKEGDNVDFKSPALVPQIAESKSVTPISSELVHLDKNEIVYFDEWRKIDISDSDLKQFVSSLELAPGSQNRFYIRFTVDEDQFERHFKSALRVNGIQDLDTVNKTFDWNREIPSLLIPPRSNLFLLETGQKITFEYIANGANAEVKKAYSLRRA

SEQ ID NO: 113 - protein, 1082 aa, Neisseria meningitidis
MAAFKPNPINYILGLDIGIASVGWAMVEIDEEENPIRLIDLGVRVFERAEVPKTGDSLAMVRRLARSVRRLTRRRAHRLLRARRLLKREGVLQAADFDENGLIKSLPNTPWQLRAAALDRKLTPLEWSAVLLHLIKHRGYLSQRKNEGETADKELGALLKGVADNAHALQTGDFRTPAELALNKFEKESGHIRNQRGDYSHTFSRKDLQAELILLFEKQKEFGNPHISGGLKEGIETLLMTQRPALSGDAVQKMLGHCTFEPAEPKAAKNTYTAERFIWLTKLNNLRILEQGSERPLTDTERATLMDEPYRKSKLTYAQARKLLGLEDTAFFKGLRYGKDNAEASTLMEMKAYHAISRALEKEGLKDKKSPLNLSPELQDEIGTAFSLFKTDEDITGRLKDRIQPEILEALLKHISFDKFVQISLKALRRIVPLMEQGKRYDEACAEIYGDHYGKKNTEEKIYLPPIPADEIRNPVVLRALSQARKVINGVVRRYGSPARIHIETAREVGKSFKDRKEIEKRQEENRKDREKAAAKFREYFPNFVGEPKSKDILKLRLYEQQHGKCLYSGKEINLGRLNEKGYVEIDHALPFSRTWDDSFNNKVLVLGSENQNKGNQTPYEYFNGKDNSREWQEFKARVETSRFPRSKKQRILLQKFDEDGFKERNLNDTRYVNRFLCQFVADRMRLTGKGKKRVFASNGQITNLLRGFWGLRKVRAENDRHHALDAVVVACSTVAMQQKITRFVRYKEMNAFDGKTIDKETGEVLHQKTHFPQPWEFFAQEVMIRVFGKPDGKPEFEEADTPEKLRTLLAEKLSSRPEAVHEYVTPLFVSRAPNRKMSGQGHMETVKSAKRLDEGVSVLRVPLTQLKLKDLEKMVNREREPKLYEALKARLEAHKDDPAKAFAEPFYKYDKAGNRTQQVKAVRVEQVQKTGVWVRNHNGIADNATMVRVDVFEKGDKYYLVPIYSWQVAKGILPDRAVVQGKDEEDWQLIDDSFNFKFSLHPNDLVEVITKKARMFGYFASCHRGTGNINIRIHDLDHKIGKNGILEGIGVKTALSFQKYQIDELGKEIRPCRLKKRPPVR

SEQ ID NO: 114 - protein, 1334 aa, Listeria monocytogenes
MKKPYTIGLDIGTNSVGWAVLTDQYDLVKRKMKISGDSEKKQIKKNFWGVRLFEKGETAAKRRMSRTARRRIERRRNRISYLQEIFAIQMNEVDDNFFNRLKESFYAESDKKYNRHPFFGTVEEEVAYYKDFPTIYHLRKELIDSQKKADLRLVYLALAHIIKYRGHFLIEGALDTKNTSIDEMFKQFLQIYNQVFANDIEEASLKKTEKNQEVAQILAEKFTRKDKLDKILSLYPGEKTTGVFAQFVNIIVGSTGKFKKHFNLHEKKDINCAEDTYDTDLESLLAIIGDEFAEVFVAAKNAYNAVVLSNIITVTDSTTRAKLSASLIERFENHKEDLKKMKRFVRTYLPEKYDEIFDDTEKHGYAGYISGKTKQADFYKYMKATLEKIEGADYFIAKIEEENFLRKQRTFDNGVIPHQLHLEELEAILHQQAKYYPFLREDYEKIKSLVTFRIPYFVGPLAKGQSEFAWLTRKADGEIRPWNIEEKVDFGKSAVDFIEKMTNKDTYLPKENVLPKHSLCYQKYMVYNELTKVRYIDDQGKTNYFSGQEKQQIFNDLFKQKRKVKKKDLELFLRNINQIESPTIEGLEDSFNASYATYHDLLKVGMKQEILDNPLNTEMLEDIVKILTVFEDKRMIKEQLQQFSDVLDGTVLKKLERRHYTGWGRLSAKLLVGIRDKQSHLTILDYLMNDDGLNRNLMQLINDSNLSFKSIIEKEQVSTTDKDLQSIVAELAGSPAIKKGILQSLKIVDELVSVMGYPPQTIVVEMARENQTTNKGKNNSKPRYKSLEKAIKEFGSQILKEHPTDNQELKNNRLYLYYLQNGKDMYTGQELDIHNLSNYDIDHIVPQSFITDNSVDNLVLTSSAGNREKGDNVPPLEIVQKRKIFWEKLYQGNLMSKRKFDYLTKAERGGLTEADKARFIHRQLVETRQITKNVANILHQRFNYKTDGNKDTMETVRIVTLKSALVSQFRKQFQFYKVREVNDYHHAHDAYLNGVVANTLLKVYPQLEPEFVYGEYHQFGWFKANKATAKKQFYTNIMLFFAQKDRIIDENGEILWDKRYLETVKKVLGYRQMNIVKKTEIQKGEFSNVTPNPKGKSNKLIPRKKDWDPIKYGGFDGSKMAYAIIIEYEKQKRKVRIEKKLIQINIMEREAFEKDEKTFLEEKGYHQPKVLIKVPKYTLYECKNGRRRMLGSANEAHKGNQMLLPNHLMALLYHAEKYEAIDGESLAYIEVHRALFDELLAYISEFARKYTLSNDRLDEINMLYERNKDGDVKSIAESFVSLKKFNAFGVHQDFSFFGTKIERKRDRKLNELLNSTIIYQSITGLYESRKRLDN

SEQ ID NO: 115 - protein, 1337 aa, Enterococcus faecalis
MKKDYVIGLDIGTNSVGWAVMTEDYQLVKKKMPIYGNTEKKKIKKNFWGVRLFEEGHTAEDRRLKRTARRRISRRRNRLRYLQAFFEEAMTALDENFFARLQESFLVPEDKKWHRHPIFAKLEDEVAYHETYPTIYHLRKKLADSSEQADLRLIYLALAHIVKYRGHFLIEGKLSTENISVKEQFQQFMIIYNQTFVNGESRLVSAPLPESVLIEEELTEKASRTKKSEKVLQQFPQEKANGLFGQFLKLMVGNKADFKKVFGLEEEAKITYASESYEEDLEGILAKVGDEYSDVFLAAKNVYDAVELSTILADSDKKSHAKLSSSMIVRFTEHQEDLKKFKRFIRENCPDEYDNLFKNEQKDGYAGYIAHAGKVSQLKFYQYVKKIIQDIAGAEYFLEKIAQENFLRKQRTFDNGVIPHQIHLAELQAIIHRQAAYYPFLKENQEKIEQLVTFRIPYYIGPLSKGDASTFAWLKRQSEEPIRPWNLQETVDLDQSATAFIERMTNFDTYLSSEKVLPKHSLLYEKFMVFNELTKISYTDDRGIKANFSGKEKEKIFDYLFKTRRKVKKKDIIQFYRNEYNTEIVTLSGLEEDQFNASFSTYQDLLKCGLTRAELDHPDNAEKLEDIIKILTIFEDRQRIRTQLSTFKGQFSAEVLKKLERKHYTGWGRLSKKLINGIYDKESGKTILGYLIKDDGVSKHYNRNFMQLINDSQLSFKNAIQKAQSSEHEETLSETVNELAGSPAIKKGIYQSLKIVDELVAIMGYAPKRIVVEMARENQTTSTGKRRSIQRLKIVEKAMAEIGSNLLKEQPTTNEQLRDTRLFLYYMQNGKDMYTGDELSLHRLSHYDIDHIIPQSFMKDDSLDNLVLVGSTENRGKSDDVPSKEVVKDMKAYWEKLYAAGLISQRKFQRLTKGEQGGLTLEDKAHFIQRQLVETRQITKNVAGILDQRYNANSKEKKVQIITLKASLTSQFRSIFGLYKVREVNDYHHGQDAYLNCVVATTLLKVYPNLAPEFVYGEYPKFQAFKENKATAKAIIYTNLLRFFTEDEPRFTKDGEILWSNSYLKTIKKELNYHQMNIVKKVEVQKGGFSKESIKPKGPSNKLIPVKNGLDPQKYGGFDSPVVAYTVLFTHEKGKKPLIKQEILGITIMEKTRFEQNPILFLEEKGFLRPRVLMKLPKYTLYEFPEGRRRLLASAKEAQKGNQMVLPEHLLTLLYHAKQCLLPNQSESLAYVEQHQPEFQEILERVVDFAEVHTLAKSKVQQIVKLFEANQTADVKEIAASFIQLMQFNAMGAPSTFKFFQKDIERARYTSIKEIFDATIIYQSTTGLYETRRKVVD

SEQ ID NO: 116 - protein, 1426 aa, Capnocytophaga ochracea
MKNILGLDLGTTSIGFAHIVEDENKEKSEIKELGVRIVSLTTDEQSDFEKGKSITTNANRTLKHGARLNLDRYQQRRKYLIDLLQKANLITPSSILAENGKNTTHSTWQLRAKAVTERIEKEEFARILLAINKKRGYKSSRKAKTEDEGQAIDGMAIAKRLYDENLTPGQLSLQLLQQNKKLLPDFYRSDLQKEFDLVWNFQKQFYPDILTDIFYKELQGKGKDATSKAFSKRYHFDTTENKGSKESVRLQAYQWRAEAISKQLSKEEVAYVLTEINNNLNNASGYLGAISDRSKELYFNRQTVGQYLYAKLQENRHNSLKNKVFYRQDYLDEFERIWETQASFHKELTDELKKQIRDVVIFYQRKPKSQKGLISFCEFESKEIEIEKDGKTITKNIGARVVPKSSPLFQEFKIWQILNNVICKRKGIRKKKISAKTTQLDLLNESSQTIFSLDMECKQLLFDELNLKGDLKSDKVLKLLGYSPQEWEINYNQLEGNRTQKALYEAYLKIVEMEAHDVKDILQIKSAKDDWSLDESPLSASEIREKVKAIFQTLGICTKILYFDPLLPVKEFEEQDSYQLWHLLYSYESDDSTSGNETLYRILEKKYAFKREHARILANVALQDDYGSLSTKAIRKIYPNIKENQYSTACEKAGYKHSKLSLTTEELEARELKNIIPLLKKNALRNPVVEKILNQMINVVNALIEKNSERDAEGKITKYFHFDEIRIELARELKKNAQKRYEMTQNINKAKLEHQKISEILQKEFGIKNPTKSDIIRYRLYQELEHNGYKELYTNAPIARDMLFSKNIEIEHIVPKARVFDDSFSNKTLTFHRINSDKGEYTAFDYITSLNSEEELNQYLTRVENAYKTKSISPTKYKNLLKKASEIGDDFINRDLRDTQYIAKKAKEILFQVTKNVLSTSGSITDRLREDWGLVDVMKELNMPKYQSLGLTEVEERKDGNKVTVIKNWTKRNDHRHHAMDALTVAFTKPSYIQYLNHLNARKDENNKNYSVILAIEEKETIKVPTNNGKNKRVFIEPIPNFRQVAKKHLEEIFISHKAKNKVVTKNTNKPAGTDKQQITLTPRGQLHKETIYGKYQYYINKEEKIGVKFDERTIAKVSNPVYREALLKRLQANDNDPKKAFAGKNALSKNPIYLDESKTKTLPEKVNLTYLEEDFSIRKDISPDNFKDLKSIEKVIDQGVKRILIKRLQAYDNDPKKAFVDLEKNPIWLNKEKGIAIKRVTISGVNNAQPLHIGKDHLGKTTLNKEGKEIPVDYVSTGNNHHVAIYRDKEGNLQEQIVSFFDAVVRAQQGIPIIDKTYKQAEGWQFLFTMKQNEMFVFPNATTGFNPAEIDLLDPKNKKLISPNLFRVQKIATKDYFFRHHLETNVETDNILKNVTWKREGLSGLKDIVKVRINHLGDIVSIGEY

SEQ ID NO: 117 - protein, 1424 aa, Parabacteroides sp.
MKRILGLDLGTNSIGWALVNEAETDEEVSSIIRLGVRVNPLTVDETQNFEKGKSITTNAERTLKRSMRRNLQRYKLRRDALVEFLKELGFITDETILSEQGNRTTFETCRLRAKAAEEEISLEELSRVLLMINKKRGYKSSRKVKKEEDGVLIDGMEIAKKLYEEDLTPGQLCSQLLESGKKVLPDFYRSDLQEELDRIWSVQKQFHPDVFCDAAKEEIKGKNRSQTWAILANYFVWKEEVVGWNDREAKNETIEKECKLVGLKRTTKGYELKKENYRWRAQALTEQLGLEEIAVVLQEINGQINASSGYLGAISDRSKVLYFNHQTVGQYQMAELDKNPHASLRNMVFYRQDYLDEFDRIWEKQAEFHKELTAELKKEIRDMIIFYQRRLKSQKGLISFCEFERLEIVVEKDGKKQTKVIGCKVIPRSHPLFQEFKVWQTLNDIKVLGREKKRNALSASESRALYPEEKEILARELAIKENMKKADVLKLLFENPQELDLNFKQIDGNRTGFSLFSAYSKMIEKYGYEPLDFKKPADEIIGQLRTIFTDLGWNTNLFTIDLTKEGKELEMQPYFRLWHLLYSFEGDNTSTGNGKLIEKIMQLCGVEKEYAVELASLSFQDDYGSLSAKAIKRILPYLKEGNLYDVACEYAGYRHSKSSLTKEEIENKVLKGKLEVLPKNSLRNPVVEKILSQMVNVINTIIDTYGKPDEIRVELARELKKSAKEREELTKAIAKSTREHEEIRKLLQDEFGMMNVSRNDIIRYKLYEELKDNGYKTLYSNQYIPKEKIFSKEIDIEHIIPQSRLFDDSLSNKTLEYKAINIEKGNKTAYDFVKEKYGEEGLQQYINRCESLFNDKKAKLRKLKMEQKDIPDGFIDRDLRNTQYIAKKALAMLNEICRRVVATTGSITDQLREDWQLVDVMKELNLPKYEALGFVETYEDKDGRKIKRIKDWTKRNDHRHHAMDALTVAFTKDAFIQYFNNKNAAQDSGNRNHTNIIGIKTRYFDKGRALPPIPLEQFRIEAKQHLEKLLVSIKAKNKVVTVNVNRTKKRKGENTKIQQTPRGQLHLETVYGSHKQYVTKIEKVNASFDAAKIATVSKRAYRNALLKRLETFGNDPKKAFTGKNALEKNPLYADKYQTIRVPEKVQTVEFETIYTIRKPVDPALNVDKVVDVKVRAILERRLKEYGGDPKKAFVNFWENPIWLNKEKGISIKRVSIRGINNAQSIHVKKDKNGNPIWDENGKQIPVDFVNTGNNHHVAIYRKPVLDKKGQVTFDEDGNLMYELDEVVVPFFEAVTRANLGLPIIDKDYRKSEGWQFLFSMKQNEYFVFPNEKTGFNPKEVDLLNPDNYAMISPNLFRVQTMSKVMYGNNVVRDYKFRHHLETTVKDMKELKDIAYKQYKTLSFGNSVVKIRINHIGQIVSVGEY

SEQ ID NO: 118 - protein, 1395 aa, Lactobacillus jensenii
MKEIKDYIIGLDIGTNSCGYVVTDKQNNILKLKGKTAIGARLFKEGQAAADRRSFRTTRRRLARRHWRLGLLEEIFDPEMEKIDPNFFRRLKESDYSPKDSRKQFNAIVFKSIKADKRFYKKYPTIYHLRNALMHDNQKHDLREIFMAVHHIVKYRGNFLREDSVNAFKAAKFSLRGEDGIGPVDKLNDLLKEIYSEYSPELATNNLSKIEDIIKDKNLYKQDKLKQVATLLIKEADSKDKAKLNKDIAKQVANSFMGYMFRLDTLFSLTDVDVKDYKLKFSDANIDESLDDLTSLLTDAQIEFVLELQSIYNTIVLNEIVPDGMSLSESMIKKYDDHKEDLKIFKEYIDSLSDQKKAKKLLSAYNLYVNYRKSDLVEAKNLFKNKKVGDKNFADVISNFEVFGKFVSDNLDDSELANKIKARLDLGEFLPKQRTNQNGVIPYQLHQVELTQILEKQGKYYPFLITPNPVESHRNNAPYEISELVSFRVPYYVGPLIDNQSIKDKQNKNKFAWMVRQKQGQITPWNLEEMVDTTESANQFIKRMTRKDTYLLAEDVLPKSSLVYQKFMILDELNRIKIDGKKLTSELKHDIFEKLFKKQKSINLDNLKNYLLVEGNIPGLIEGLSDGINFNNSFSTYIDYRNIFGDEIDNPNKQADFEKMIEWSTVFEDRKIFKRKLKEITWLTSEQIKQVSSKRYSGWGRLSKKLLTQITDENGVNILQRLWNEPETLTEVLANPVIKRKIVEANSSFTKAKDMKDILVEAYTSPQNKKAIRQVMRVVDDIIAAAHGKKPSQIAIEFAREDQDNPQMTKSRKAQLDQIYAKISDEFLDDAVKNELKNMKDNKPLAKDKVFLYFKQMGRDAYSGEKLSLDNLQDYDIDHIYPQSFIKDDSFDNRVLVQRAYNNGKSDNVPVLLFGNKIAAGLGITIRQMWKKWLELGLISKRKFNNLITDPEKISRNMASGFVNRQLVETSQVIKLVANILQAKLPDTEIIEVKASYNSILRKEFNLYKSREVNDYHHAIDAYLTTIVGNYLYQVYPKLRPYFVYGQFKKFGKAENQEDDPVKKIKKFNFIYQLIWGKDDAICISHTNQQVFSKKDIIDKLTTAYNFKYMNISHAVYTRNNNMFKQTLFPIIERTTAKTKSLIPKKLDRPTDIYGGYSNNNDAYLALVKVDKKRGSEYRVVGIPMRAAAMLKASKNYDEDLRKVIEPMVMFDKNGKAKRGIEGFRVLVGKMPFKQAVLDGNKKFMLTGTVDTPNLKQLVLSQQNMKYILDYIEDVDCRKHKFGDKVQNPDKCLLEVFDEIIEIVDKYFELFDSRDFREKLRNSRNKFIKLEASKKADTILAILKGLQAKSTRATIKELNISDFGRIITSSISPEAQLIYQSPTGLFERRVKVKDL

SEQ ID NO: 119 - protein, 1140 aa, Roseburia intestinalis
MRENGSDERRRNMDEKMDYRIGLDIGIASVGWAVLQNNSDDEPVRIVDLGVRIFDTAEIPKTGESLAGPRRAARTTRRRLRRRKHRLDRIKWLFENQGLINIDDFLKRYNMAGLPDVYQLRYEALDRKLTDEELAQVLLHIAKHRGFRSTRKAETAAKENGAVLKATDENQKRMQEKGYRTVGEMIYLDEAFRTGCSWSEKGYILTPRNKAENYQHTMLRAMLVEEVKEIFSSQRRLGNEKATEELEEKYLEIMTSQRSFDLGPGMQPDGKPSPYAMEGFSDRVGKCTFLGDQGELRGAKGTYTAEYFVALQKINHTKLVNQDGETRNFTEEERRALTLLLFTQKEVKYAAVRKKLGLPEDILFYNLNYKKAATKEEQQKENQNTEKAKFIGMPYYHDYKKCLEERVKYLTENEVRDLFDEIGMILTCYKNDDSRTERLAKLGLVPIEMEGLLAYTPTKFQHLSMKAMRNIIPFLEKGMTYDKACEEAGYDFKADSKGTKQKLLTGENVNQTINEITNPVVKRSVSQTVKVINAIIRTYGSPQAINIELAREMSKTFEERRKIKGDMEKRQKNNEDVKKQIQELGKLSPTGQDILKYRLWQEQQGICMYSGKTIPLEELFKPGYDIDHILPYSITFDDSFRNKVLVTSQENRQKGNRTPYEYMGNDEQRWNEFETRVKTTIRDYKKQQKLLKKHFSEEERSEFKERNLTDTKYITTVIYNMIRQNLEMAPLNRPEKKKQVRAVNGAITAYLRKRWGLPQKNRETDTHHAMDAVVIACCTDGMIQKISRYTKVRERCYSKGTEFVDAETGEIFRPEDYSRAEWDEIFGVHIPKPWETFRAELDVRMGDDPKGFLDTHSDVALELDYPEYIYENLRPIFVSRMPNHKVTGAAHADTIRSPRHFKDEGIVLTKTALTDLKLDKDGEIDGYYNPQSDLLLYEALKKQLLLYGNDAKKAFAQDFHKPKADGTEGPVVRKVKIQKKQTMGVFVDSGNGIAENGGMVRIDVFRVNGKYYFVPVYTADVVKKVLPNRASTAHKPYGEWKVMEDKDFLFSLYSRDLIHIKSKKDIPIKMVNGGMEGIKETYAYYIGADISAANIQGIAHDSRYKFRGLGIQSLDVLEKCQIDVLGHVSVVRSEKRMGFS

SEQ ID NO: 120 - protein, 992 aa, Treponema vincentii
MQKNSGEDENCGFEFLTEEEKELIKPLFFRISKPSFQFADIEKKLKGKNGFWKFNYRKDTNVSGCPVSAGLKNIFGDEASAESWKDKKVGQYDMCDIWHVLFDFDDEEKLLEFAKRKLFLSDEAAKKFCAIRIQQGYANLSLKAIRKITPFLRKGYIYSTAVFLANIPFMIGRDIFLQNEKEIEDSVKNIIGTLRDKNNIIVLANRCIESAFKDKDNDFRFEEWDKALVENSAWDLFGKKKWNEYDEEKRKTIISQVSEKVEDNLKIAVGKNPNDYKYPLLRTDDLIMDYLNQKGFVVKGELYHPSDTDYNFETPVPAEDGKIYLASPRSPSVKNPVVMRALHQLRKLVNYLIKTGKIDSTTKINVELANDVNDKNQRKAIEELAKTNEKNNADARKKIEELCNEAGFKVVPTESDIKKFRLWKEQNETCPYTGKHISFTDLFGPIPKFDFEHTIPRSLSYDDSLENLTLCDSEFNRNIKKQRLPSELPDFEEINKRFLKFYEDKIDNCLRIIELNSKSGGSYEEPAVKDLRIVKKHKAQYELNYYKEKLRRFSSTEITSGFKHSQLNDTRIITKFSLSYLKGVFDHVQPVKGSMTDTFKRQWGLMERNEIKDRSNHTHHTVDALTVACINRGKFNLLSEAIKNSSDGKHLKFPKPWETFDTDVLNAVRYIIPKYFSDESSLRQSKKILRGRDGKPVLKNGKAVFIQGATARGSLHKDTFYGCIKTVPEKGGKSEMIFVQRIPVSTLDEKVAEKIIDKRIRKTFEKNLSTGIQTLQEIQTDGILLPFKKEGRDVFVKRVRIKAHPTSPIILKKHHNVINKNPKDYKQNYYVENEENYLLAIYRGKDAKGKDVSDHKLCNLLNAVKSRQNKTGFYPDFKEKKGINLQLYKVLKIGKIVILQNDIQEDVFALPKEKLWKRMYRIAGLATSRNDIQIKLVHIIRETPWGYMKGEKDLNAGKECLLYGTANFKGLVEGQDFTVSPAGEIIQKARVC

SEQ ID NO: 121 - protein, 1340 aa, Enterococcus faecium
MKKEYTIGLDIGTNSVGWSVLTDDYRLVSKKMKVAGNTEKSSTKKNFWGVRLFDEGQTAEARRSKRTARRRLARRRQRILELQKIFAPEILKIDEHFFARLNESFLVPDEKKQSRHPVFATIKQEKSYHQTYPTIYHLRQALADSSEKADIRLVYLAMAHLLKYRGHFLIEGELNTENSSVTETFRQFLSTYNQQFSEAGDKQTEKLDEAVDCSFVFTEKMSKTKKAETLLKYFPHEKSNGYLSQFIKLMVGNQGNFKNVFGLEEEAKLQFSKETYEEDLEELLEKIGDDYIDLFVQAKNVYDAVLLSEILSDSTKNTRAKLSAGMIRRYDAHKEDLVLLKRFVKENLPKKYRAFFGDNSVNGYAGYIEGHATQEAFYKFVKKELTGIRGSEVFLTKIEQENFLRKQRTFDNGVIPHQIHLSELRAIIANQKKHYPFLKEEQEKLESLLTFKIPYYVGPLAKKQENSPFAWLIRKSEEKIKPWNLPEIVDMEGSAVRFIERMINTDMYMPHNKVLPKNSLLYQKFSIYNELTKVRYQDERGQMNYFSSIEKKEIFHELFEKNRKVTKKDLQEFLYLKYDIKHAELSGIEKAFNASYTTYHDFLTMSENKREMKQWLEDPELASMFEEIIKTLTVFEDREMIKTRLSHHEATLGKHIIKKLTKKHYTGWGRLSKELIQGIRDKQSNKTILDYLINDDDFPHHRNRNFMQLINDDSLSFKKEIKKAQMITDTENLEEIVKELTGSPAIKKGILQSLKIVDEIVGIMGYEPANIVVEMARENQTTGRGLKSSRPRLKALEESLKDFGSQLLKEYPTDNSSLQKDRLYLYYLQNGRDMYTGAPLDIHRLSDYDIDHIIPRSFTTDNSIDNKVLVSSKENRLKKDDVPSEKVVKKMRSFWYDLYSSKLISKRKLDNLTKIKLTEEDKAGFIKRQLVETRQITKHVAGILHHRFNKAEDTNDPIRKVRIITLKSALVSQFRNRFGIYKVREINEYHHAHDAYLNGVVALALLKKYPQLAPEFVYGEYLKFNAHKANKATVKKEFYSNIMKFFESDTPVCDENGEIFWDKSKSIAQVKKVINHHHMNIVKKTEIQKGGFSKETVEPKKDSSKLLPRKNNWDPAKYGGLGSPNVAYTVAFTYEKGKARKRTNALEGITIMEREAFEQSPVLFLKNKGYEQAEIEMKLPKYALFELENGRKRMVASNKEAQKANSFLLPEHLVTLLYHAKQYDEISHKESFDYVNEHHKEFSEVFARVLEFAGKYTLAEKNIEKLEKIYKENQTDDLAKLASSFVNLMQFNAMGAPADFKFFDVTIPRKRYTSLTEIWQSTIIHQSITGLYETRIRMGK

SEQ ID NO: 122 - protein, 1363 aa, Lactobacillus rhamnosus
MTKLNQPYGIGLDIGSNSIGFAVVDANSHLLRLKGETAIGARLFREGQSAADRRGSRTTRRRLSRTRWRLSFLRDFFAPHITKIDPDFFLRQKYSEISPKDKDRFKYEKRLFNDRTDAEFYEDYPSMYHLRLHLMTHTHKADPREIFLAIHHILKSRGHFLTPGAAKDFNTDKVDLEDIFPALTEAYAQVYPDLELTFDLAKADDFKAKLLDEQATPSDTQKALVNLLLSSDGEKEIVKKRKQVLTEFAKAITGLKTKFNLALGTEVDEADASNWQFSMGQLDDKWSNIETSMTDQGTEIFEQIQELYRARLLNGIVPAGMSLSQAKVADYGQHKEDLELFKTYLKKLNDHELAKTIRGLYDRYINGDDAKPFLREDFVKALTKEVTAHPNEVSEQLLNRMGQANFMLKQRTKANGAIPIQLQQRELDQIIANQSKYYDWLAAPNPVEAHRWKMPYQLDELLNFHIPYYVGPLITPKQQAESGENVFAWMVRKDPSGNITPYNFDEKVDREASANTFIQRMKTTDTYLIGEDVLPKQSLLYQKYEVLNELNNVRINNECLGTDQKQRLIREVFERHSSVTIKQVADNLVAHGDFARRPEIRGLADEKRFLSSLSTYHQLKEILHEAIDDPTKLLDIENIITWSTVFEDHTIFETKLAEIEWLDPKKINELSGIRYRGWGQFSRKLLDGLKLGNGHTVIQELMLSNHNLMQILADETLKETMTELNQDKLKTDDIEDVINDAYTSPSNKKALRQVLRVVEDIKHAANGQDPSWLFIETADGTGTAGKRTQSRQKQIQTVYANAAQELIDSAVRGELEDKIADKASFTDRLVLYFMQGGRDIYTGAPLNIDQLSHYDIDHILPQSLIKDDSLDNRVLVNATINREKNNVFASTLFAGKMKATWRKWHEAGLISGRKLRNLMLRPDEIDKFAKGFVARQLVETRQIIKLTEQIAAAQYPNTKIIAVKAGLSHQLREELDFPKNRDVNHYHHAFDAFLAARIGTYLLKRYPKLAPFFTYGEFAKVDVKKFREFNFIGALTHAKKNIIAKDTGEIVWDKERDIRELDRIYNFKRMLITHEVYFETADLFKQTIYAAKDSKERGGSKQLIPKKQGYPTQVYGGYTQESGSYNALVRVAEADTTAYQVIKISAQNASKIASANLKSREKGKQLLNEIVVKQLAKRRKNWKPSANSFKIVIPRFGMGTLFQNAKYGLFMVNSDTYYRNYQELWLSRENQKLLKKLFSIKYEKTQMNHDALQVYKAIIDQVEKFFKLYDINQFRAKLSDAIERFEKLPINTDGNKIGKTETLRQILIGLQANGTRSNVKNLGIKTDLGLLQVGSGIKLDKDTQIVYQSPSGLFKRRIPLADL

SEQ ID NO: 123 - protein, 1234 aa, Prevotella tannerae
MPNFWSIFTENLQTYLMKTRILGLDTGTNSLGWAVVDRDENNQYTPICRGDLIFTEGVKQEKGIEFSLAAERTSYRASRRHYFRRRLRKVEVLKVLVKHKLCPPLSDEALNRWHTKKEYPLDEDFILWQRTNEADNKNPYHDRHICLHRKLNLKDSQTDRYTLGRALYHLTQRRGFLSNRLDQNEEAEETGKVKSAISELSKEMKEAGCEFLGDYFYLLYRTEGNRVRIRSRYTDREKHYLQEFKEICRVQELDEDLAKALEKTIFFQRPLKSQRQGVGKCTMEKGHSRCAVSHPLYEEYRLLCYLNNIRIKTPSDDRLRPLNAEEREKITPLFYKEKNFDFEKIAKKLAGKTPFGWIRDAEDWPYQFNYRMTQEAPACPTTAQLIKVFGEDWKAALAETYTMSAKQDGTLKTEDEICTDIWNVLYSFSSKEKLKEFGLKKLQLDEVQAKAFSEIRLTRDFASLSLKAIRKILFFLRTGEDYSKAIFLANIPTIVGEEIWNDIERRSRLLYKVDLALRPQEERDAEEHRTIAERIKAAVAAEVPDAPIDLLYHPSMIEAYPDAKRNERFDCYQLGSPKTNAVRNPMAMRSLHMVRKVINHLLRKHIIDEKTEIHIEYARELNDANKRQAIADWQRELSKRHTAYAQNIRQLYKAETGLVIEPTKADILKYQLWEEQQHVCLYTGKKIGIADFLGANPKFDIEHTIPRSRGGDSTQENLTLCESKFNRDIKRDKLPTELANYEEILARIEHWKKQCYALKLKRDGIRTHSGLEKSIKDSRIRRRHLVGLEYGYLKGKYDRFTMKEVPEGFSRRQGAGIGLISKYAGLFLKSLFKDPKNPNRSNVYVVKGAITAEFRKLWGLQQADEAKSRENHTHHCIDAYTIACIGPCEYAALAAYYRSDEEFKYGRRREKPQFEKPWPTFTEDLLKLQEELLIVHQTTDKLGKRDRRKVKTPRGKFLTGGDSARGRLHQETYYGAINYDGNIKYVVRKPLDSLTEKDLDKIVDETVMGIVKGAVEAKGSLKEALADGIYMNKEKGILIKRVRIFSDVSEPINLKQLRDVSTKEYKRHIHLRKDENYLFAIYEGIDKKKNKKQTETATVDYLDAAKFYKDSKRRDKANSLVGDYSKKNKLPLKCILKKRQMVLFYEHSPEEIRFKDKKDLSRRLYIVTSIAKDGRVKFLHHQAATATGIQSSPSPFTNDGEHQPYYRLSASNIKVLVAGIDFDINILGEITPKL

SEQ ID NO: 124 - protein, 1496 aa, Prevotella veroralis
MKTILGLDLGTNSIGWAKVCVDDNGNYLRDIKLGSRIIPMSQDVLGNFDKGVTESQTSVRTGFRGVRRIRERSLLRRERLHRVLHVLGYLPPHYDSAIGWNKNEPSTYGKFLNHGEPKLAWEHKEDGSMRFLFMESFHEMMADFAKSQPSLVSDGKKIPLDWTIYYLRKKALSQPIRKEELAWLLLNFNQKRGYYQLRGEEDDDNPTKCEEYYELKVVGIEADEEGKNGNTWYNVKLENGWIYRRQSKIPLDDWIGKVREFIVTTEYEKDGITLKKDKNGDVKRSFRSPSEDDWGLRKKRTEKLLDSSKMTVGAFVYDHLLAEPSDKIRGKFIRTIERKYYKKELYAILCEQSKYHEELRSGDYLNKCAEELYKNNQPHRNSLLTKDLAYLLLEDLIFYQRPLKTKKSLIAECPYEAYKYVDKETGEIKRQGIKCIAKSNPYYQEFRLWQFISNLRLFNKADDKEVTADYLPTQDDYVRLFAYLNDRKEINQETLLKEFFKLKKITVNSEKVFPIRWNYIEDKEKKYPCNETRHELLLALDRARIDHSWLEKPGQEYRLWHLLYSVESKEETKEALRKLKDDDAFVESFLKVKPFKREYGAYSEKAIKKLLAVMRMGSLWRETDICDTTKGNITKILQGEIDEKLKEKISASVSSYNQLSDFQGLPVWLACYVVYGRHSEAAEIQHWKTPESLLAYINGFKQHSLRNPIVEQCILETLRTVHDIWKEVGHIDEIHVELGRNMKSTADQRARISENVLRNENTNLRIKSLLLELKNDPNIKDVRPYSPMQQEKLRIYEEGVLQELTKDDKDFTEITKISTMAQPSAKELQRYKLWLEQKYRSPYTGKSISLTKLFTSAYQIEHVIPQSRYFDDSFSNKVICESEVNSLKDNMLGYEFIKNHGGEIIHCTMLGDVKVLSESEYKAFVNDHYAHNKRKRENLLLEDIPQEFLNRQMNDSRYISKVVKALLSNIVRAEGEEEATSKFVVSCSGGITDRLKKDWGLNDVWNKIVYPRFERLNRLTGTEAFGQWENKDGKRVFQTAVPLELQRGFNKKRIDHRHHAMDALVIACTSRNIINYLNNESANNPKKREDLRQKLCDKNRTIRKPWETFTQDATAALEDVIVSFKNYVRIINKATNYYERYDVEGKKVIAEQRGDDMWAIRKPMHEATYYGRVNLRRKKKVNLRVALENISSICDNKLRIYINGLVEKGFNTKQILDKFKNTNDHFSMQKIDKVEIWQFTNEEEKLVATRKPLDTSFDTKKIASITDTGIQTILLNYLETKGGDSTIAFTPEGIVEMNQNISKYNNGKEHMPILKVRLYTKLGKKIPVGQTGCKAKQFVIAEAGTNLYFAIYEDEEGKRSYRTIPLNEVVERLKQGLSPVPEKNDKDVHLKFYLSPNDLVYVPIEDEHESLAKDHIYKFVDSSGTTANFIPHRSANVIFELNKKDAEKFCSGSIIQNEYGVGSSQSKNQKAITGEMIKAVCRKLEVDRLGNVIKVI

SEQ ID NO: 125 - protein, 1082 aa, Neisseria cinerea
MAAFKPNPMNYILGLDIGIASVGWAIVEIDEEENPIRLIDLGVRVFERAEVPKTGDSLAAARRLARSVRRLTRRRAHRLLRARRLLKREGVLQAADFDENGLIKSLPNTPWQLRAAALDRKLTPLEWSAVLLHLIKHRGYLSQRKNEGETADKELGALLKGVADNTHALQTGDFRTPAELALNKFEKESGHIRNQRGDYSHTFNRKDLQAELNLLFEKQKEFGNPHVSDGLKEGIETLLMTQRPALSGDAVQKMLGHCTFEPTEPKAAKNTYTAERFVWLTKLNNLRILEQGSERPLTDTERATLMDEPYRKSKLTYAQARKLLDLDDTAFFKGLRYGKDNAEASTLMEMKAYHAISRALEKEGLKDKKSPLNLSPELQDEIGTAFSLFKTDEDITGRLKDRVQPEILEALLKHISFDKFVQISLKALRRIVPLMEQGNRYDEACTEIYGDHYGKKNTEEKIYLPPIPADEIRNPVVLRALSQARKVINGVVRRYGSPARIHIETAREVGKSFKDRKEIEKRQEENRKDREKSAAKFREYFPNFVGEPKSKDILKLRLYEQQHGKCLYSGKEINLGRLNEKGYVEIDHALPFSRTWDDSFNNKVLALGSENQNKGNQTPYEYFNGKDNSREWQEFKARVETSRFPRSKKQRILLQKFDEDGFKERNLNDTRYINRFLCQFVADHMLLTGKGKRRVFASNGQITNLLRGFWGLRKVRAENDRHHALDAVVVACSTIAMQQKITRFVRYKEMNAFDGKTIDKETGEVLHQKAHFPQPWEFFAQEVMIRVFGKPDGKPEFEEADTPEKLRTLLAEKLSSRPEAVHKYVTPLFISRAPNRKMSGQGHMETVKSAKRLDEGISVLRVPLTQLKLKDLEKMVNREREPKLYEALKARLEAHKDDPAKAFAEPFYKYDKAGNRTQQVKAVRVEQVQKTGVWVHNHNGIADNATIVRVDVFEKGGKYYLVPIYSWQVAKGILPDRAVVQGKDEEDWTVMDDSFEFKFVLYANDLIKLTAKKNEFLGYFVSLNRATGAIDIRTHDTDSTKGKNGIFQSVGVKTALSFQKYQIDELGKEIRPCRLKKRPPVR

SEQ ID NO: 126 - protein, 1512 aa, Fibrobacter succinogenes
MKKILGLDLGTNSIGWAVVNADEITRDDGSRYLKPNGISAAGSRIIPMSADILGDFEKGNSISQTAERTRMRMARRLHERALLRRERLLRVLNLLDFLPKHFADKIDRYGKFTDDSEPKLAWRKNTEGKYEFIFQDAFNEMLAEFKDKQPEIVEEGKKIPYDWTIYYLRKKALEKALSKEELSWILLQFNQKRGYYQLRGEEEEIPQDKKIEYLAQKVVKVEATDQKKGDDVWYNVYLENGMIYRRTSKAPLDWEGKVKEFIVTTEVENDGETPKKDKEGNIKRSFRAPKEDDWTLLKKKTEADIENSHKTVGCYIYDSLLNNPKQKIIGKLVRTVERKFYKEELTQILKKQVELIPELRDDNLYKQCIEELYPINEAHRNTIAKTDFANLFINDILFYQRPLKSKKSQIDNCPYEERIFIDSKTGEKKKVPVKCIAKSNPLFQEFRLWQFIQNLRIYQREKEIDGKLLTDIDITSECLKSEEDYVRLFDWLNDRETIEQEDLLKHLFNTKKSKNKENPYRWNYVEDKVYPCNETRATILKGFSKCGINASVLSPELEMALWHILYSVEDKKEIETALTHFAQKQGWNDDFAKVFSKAKPFKKDYGSYSEKAIKKLLSLMRMGKYWNQDNIDKNTLDRIDKIINGEYDEKISNRVRDNAINLKDISDFRGLPVWLACYIVYDRHSEAKDCTKWNSPEEIDSYLKKFKQHSLRNPIVEQVVTETLRTVRDIWIQEEQIDEIHLELGRDLKNPADKRKKMSENILKNENTNLRIKAMLMEFMNPSMGIENVRPYSPSQQDILRIYEENALDNLTKDDKDFDFISKISKQAQPSKTDIIRYKCWLEQKYRSPYTGKTISLSKLFTPAYEIEHVIPQSLYFDDSFSNKVICEAEVNKLKDRQLGYKFIAEHHGEKVQLSQGEVVEILSVDAYEKFVKENYANNRIKMKKLLMESIPDEFIERQLNDSRYISKVVKGLLSNIVREKIDDENYEPEAVSKNLISCNGAITDRLKKDWGMNDVWNSIILPRFIRMNQITGKDCFTTTNAEGHLIPQMPLELQKGFNKKRIDHRHHAMDAIVIACTTRDHVNLLNNEAAHSKFNATRYQLQRKLRRFEKAVIDGKEREVAKEFLKPWDSFSSDSKNILENIIVSFKQNQRVINKTTNAFLHFDENGKKTFIKQGKGDSWAIRKSMHKDTVFGEINLRKVRSVSLNEAIKVPERVLNKKIKEKILELKNNKIDAKNIKKYIEENHTGGYGIDSSKIDVFYFTKETKERFFATRKTLDTSFNQAKIKDSIADSGIQKILLAHLKSKNGDAEQAFSPDGIDEMNKNIVELNNGKFHQPILKVRVYEKADKFAVGQKGNKKVKFVEAAKGTNLFFAIFEKDGKRSYLTIPLNVMIDCQKQYGNQWKNNIEAYLKEKELVEKDVKLQFILSPNDLVYLPTEGSIDKKRIYKVVSFTNNRLYAIPYAIAKSIVDKNEFTQLNKIEFTDNKESIKDACVPVIIDRLGNVIEFNGKRL

SEQ ID NO: 127 - protein, 1259 aa, Streptobacillus moniliformis
MKYILGLDLGVASIGWAVTEINEKGEPVGLIDANSVIFKPLDNDKGKLYNVERRDKRGSRRILRRKKHRVERTKMLLVNSSFLTNEEIDNLYVGKLDNIYEVRLKGLKEQLSKNEIARLMIYYCKNRGFKSNRKTEDLEILKSLGEKISEKDSDEKKLKPIIAKNTELIESKGLTPIEVIYMIRENDNSILGFKNKEGNYKFGFKRNQVIDEVRKILGTQQILSKEIVDEYIDILSSQRDFSDGPGGDSKYKIDYTKLAGKCKYTGEVRAVKSAPSYEIFTMLQKLNDIRYVKFTSEDKIEKKKLSKEVIHKLYDLVVEKNKTLTYDLIEKSIDEENIKLLNIPKLSKSKYVELRKSYFKERNDNENLTEEEINAFNEKLNNERMKQELIRNNLKAYKELKSKFKKNNIDENRIKELGGIYFLDLVAELLTYSKTDEKLEYFVENVERYSLFKEQRDIVEIIKTFPNYTKNGNLSLSLVRELNKLLMEGHDYESSLSSLNYYIDTDVDWEKFPTISEIEDSLSTKITNPNVKHILVILRKLYNTLLFKYGRPEKVHLELSRDFSNDFSTRNKIQKEQLENKVRREVAAFEMYGANKDIVAGKDRLSNDDFVRIKLWEEQNKVCMYSGRTIEKYQLTSAEVQIDHILPYSKSFDNSYSNKVLVFSNENQDKKERTPYQWLKGTEKWNEFKQRVRLNLNISNKKKENLLFEDEVVNNEFLERELHATSYSSRLALNIFQRLIPVSDEDKYDEHGNEKVKYLYNRNVIAFQGKMTSMLRNLYSLNKYTHSFESDTLDIDNKAFILKEFEINKDNLKMTAYNVNTGLEITSETKVEKNKSGEFKTIKDELLKKELDKKENLIEISDYFKDKVLFDLKIVDFEEIDTVEPEIISILYKMITALKEEVYSKNRENHLHHSLDAFLLTIMNRSMQMKLIKYNQLISVLKNKEIEIFNEEKGEYIDSKEFAEELQKQKIIDIDGNERGIKFNVNGKTHRLNLVKPYENFLDDIKNKIFDKRENNKLPYHVVKSKVSGALHAETILGESKGEITKRISVFDINYKNLGKIFDKDGSQKEIYETLVKWLEAKSKDYPKLKNGNIIKKVKIVDGNKDKLIKLGNKRYVEMGRTTVKILVLKKEAEEGLKFASIGRYKYNLLKSEKDVNISIWKDAIHFCKVRYNKLKENGYRLIHELIPGETIELELNKGNISKCLVVGFSGGKIEISSVIGDALDLINDKISTRIKERYYITVSTIKSIKKINKNILGD

SEQ ID NO: 128 - protein, 1091 aa, Mobiluncus mulieris
MDSRKYRVGIDVGTNSVGFAAVEEDDSGSPTRFLNTMVVIHDSGVDPEQKKYAITRLASAGTARRTRRLYRTRRQRLRELDDFISNELGYPLVNLENFADPYEPWKVRADLATTKLPNDELPEAMSIALRHMARHRGWRSPYQRVEALHLHAEISKEFAALKERVVEKTGDVFSDDATPAEVLVDLMGRQKVRGADGVLSGKLRQSDNANELRKIASVQGIDDETLNRIIDRVFSSKSPKGKASERVGMDALPGQGSKPRALKAMPSFQKFRVVSVICNLRIKDSGGDARPLSMEEKEKLIDYLMSSTTDDHVTWTDVADLLHVKRSQLQGTAKEGFDGERPYTRPPVNSTWSKIKDSKIKSLVALWKTGDVDVQSAIVEALSNASVLEDSRPGADIVVAYLESLDDKELESLDKVGLPAGRASYSEDSLERLTERMLRDDCDLFEARKREFNVADDWKPPADPIYAPVGNPGVDRVLKIVNRLLMAAEREWGAPTQINIEHVRSGFSSELMQREFERENERRRAQNEEAVKAILTEKGGNSRVSKYDITRYYAVKRQHCQCLYCGTPITFSDCELDHIVPRKGVGSTNTRVNLAAACRSCNRDKSNLPFAVWAGKASNFDVSIDDAVSRVKQWQRSQNEGVREFRAFQNEVISRLLKTTEDPEIDSRSLESVAWMARELHHRVEYYFQSKGAQTQVSVYRGAVTAQARKSSGLEDKVKMIGGGGKTRLDRRHHAMDAATIALMTPGISTTLSEKNNLRDAQKFTGQSETWKDYCGRTETARKHFAVWKSNMERLTDLFNDKLENDAIPVVQPLRLRLSNSKAHDDGIGKLDSKKLGSVWSLADIDRAATPQIWTALTRCDDFDPTKGLPENANRVIRAQGVKYESEDNIPVFPSNVAAIAVRDGYAEIGSTIHHARIYRIDDGKKTFYSMIRVFAVDLLKHQAEDLFTVKLPPSAISIRTCEDSLRRALSNGTAEYLGWLVPGDEIIVDTSDKAFHTGQIGDLLRNFPVNSFRLTGFPSNSRLRLKPVLLAGEGLRDDAEDSIKKILLGQGWRPAINVLFSKGKPRIVRRNSLGIERPSSNNGLPFSWEA

SEQ ID NO: 129 - protein, 872 aa, Candidatus Parvarchaeum
MLGSSRYLRYNLTSFEGKEPFLIMGYYKEYNKELSSKAQKEFNDQISEFNSYYKLGIDLGDKTGIAIVKGNKIILAKTLIDLHSQKLDKRREARRNRRTRLSRKKRLARLRSWVMRQKVGNQRLPDPYKIMHDNKYWSIYNKSNSANKKNWIDLLIHSNSLSADDFVRGLTIIFRKRGYLAFKYLSRLSDKEFEKYIDNLKPPISKYEYDEDLEELSSRVENGEIEEKKFEGLKNKLDKIDKESKDFQVKQREEVKKELEDLVDLFAKSVDNKIDKARWKRELNNLLDKKVRKIRFDNRFILKCKIKGCNKNTPKKEKVRDFELKMVLNNARSDYQISDEDLNSFRNEVINIFQKKENLKKGELKGVTIEDLRKQLNKTFNKAKIKKGIREQIRSIVFEKISGRSKFCKEHLKEFSEKPAPSDRINYGVNSAREQHDFRVLNFIDKKIFKDKLIDPSKLRYITIESPEPETEKLEKGQISEKSFETLKEKLAKETGGIDIYTGEKLKKDFEIEHIFPRARMGPSIRENEVASNLETNKEKADRTPWEWFGQDEKRWSEFEKRVTSLYSKKKISERKREILLNKSNEYPGLNPTELSRIPSTLSDFVESIRKMFVKYGYEEPQTLVQKGKPIIQVVRGRDTQALRWRWHALDSNIIPEKDRKSSFNHAEDAVIAACMPPYYLRQKIFREEAKIKRKVSNKEKEVTRPDMPTKKIAPNWSEFMKTRNEPVIEVIGKVKPSWKNSIMDQTFYKYLLKPFKDNLIKIPNVKNTYKWIGVNGQTDSLSLPSKVLSISNKKVDSSTVLLVHDKKGGKRNWVPKSIGGLLVYITPKDGPKRIVQVKPATQGLLIYRNEDGRVDAVREFINPVIEMYNNG

SEQ ID NO: 130 - protein, 1229 aa, Pediococcus acidilactici
MGDRKYNLGLDIGTSSIGFAAVDENNQPIRVKGKTAIGVRLFEEGKTAADRRGFRTTRRRLSRRRWRINLLNEIFDAHLAEVDPTFLARLKESNRSNLDPKKSFQGSLLFPERKDYQFYEEYPTIYHLRKALMEKDRKFDIREIYLAVHHIIKYRGNFLNGTPMRSFKVENIELNTLFDQLNQLYAEIVPDNELAFDLAQVADVKDVLSSTTIYKMDKKKQLVKMMLLPASNKALQSENKKIVTQFVNAILNYKFKLDVLLQVETDADWSLKLNDEGADDKLEEFTGDLDENRLEIIDLLQRLHNWFSLNEITKDGNSLSAAMVEKYENHHHHLGLLKKVIENHPDAKKAKALKETYTAYVGKTDDKTQNQDDFYKAVEKNLDDSPDAKGIKRLIQLDQFMPKQRTGQNGAIPHQLHQQELDQIIEKQSKYYPFLAEPNPNVKRRKDAPYKLDELIAFKIPYYVGPLVTPEEQAQNKENVFAWMKRKAAGPITPWNFDEKVDRMESANRFIRRMTTKDTYLFGEDVLPAESMIYQKFVVLNELNNLKINGRHLSLKDKQDVYNDLFKQQKTVSIKALQNYYVTKKKAATAPTVGGLADPKKFLSSLSTYIDFKNMFGERVNDPQFQEDLEQIVEWSTIFEDRGIFKAKLQALGWLSEKQIQQLVAKRYKGWGRLSKKLLTGLKNAEGYSILDEMWRSTENFMQIQSRPEFAALIQQANEKQFEGNDPDNVWENIENILGDAYTSPQNKKAIRQVVKVVQDIEKAVGNPPEKIAIEFTREAAANPQRTQSRLRTLEKLYESAEEVVDAGLTAELAEFKENKHVLSDKYYLYFTQLGRDVYTGDTISLDKLNDYDVDHILPQSFIKDDSLDNRVLTIRAVNNGKSDNVPAKMFGKKMGSFWRHLLDNGMISKRKYNNLITDPDNISKYAQKGFINRQLVETSQVIKLTANILNGIYDKDTEIIEVPAKMNSQMRKMFDLVKVREVNDYHHAFDAYLTIFIGNYLYKCYPKLRPYFVYDNFKKFGNKEDIGHKRFNFLGKIEREKKVVAPETGEILWSNVAPNETIKQIKKVYNYKFMIVSREITTRRAELFNQTVYPKNYRGKLIPIKEDRPTDLYGGYSGNTDAYLAIVALEDKKKGKYFKVVGIPTRAAAKLEKLKQQDSQQYLQALHEVIAPQFTKSTKKGIKKTEFEIVLDKVHYRQLVQDGPVKMMLGSSTYKYNAKQLVLSEKAL

SEQ ID NO: 131 - protein, 1398 aa, Veillonella parvula
METQASNQLISSHLKGYPIKDYFVGLDIGTSSVGWAVTNKAYELLKFRSHKMWGSRLFDEGESAVARRGFRSMRRRLERRKLRLKLLEELFADAMAQVDPTFFMRLRESKYHYEDKTTGHSSKHILFIDKNYNDQDYFKEYPTVYHLRSELMKSGTDDIRKLFLAVHHILKYRGNFLYEGATFDSNASTLDDVIKQALENITFNCFDCNSAISSIGQILMEAGKTKSDKAKAIEHLVDTYIATDTVDTSSKTQKDQVKEDKKRLKAFANLVLGLNASLIDLFGSVEELEEDLKKLQITGDTYDDKRDELAKAWSDEIYIIDDCKSVYDAIILLSIKEPGLTISESKVKAFNKHKDDLAILKSLLKSDRSIYNTMFKVDEKGLHNYVHYIKQGRTEETSCNREDFYKYTKKIVEGLSDSKDKEYILSQIELQILLPLQRIKDNGVIPYQLHLEELKAILAKCGPKFPFLNEVADGFSVAEKLIKMLEFRIPYYVGPLNTHHNVDNGGFAWAVRKASGRVTPWNFDDKIDREKSAAAFIKNLTNKCTYLLGEDVLPKSSLLYSEFMLLNELNNVRIDGKPLEKVVKEHLIEAVFKQDHKKMTKNRIEQFLKDNGYISETHKHEITGLDGEIKNDLASYRDMVRILGDGFDRSMAEEIITDITIFGESKKMLRETLRKKFASCLDDEAIKKLTKLRYRDWGRLSQKLLNGIEGCDKAGDGTPETIIILMRNFSYNLMELLGDKFSFMERIQEINAKLTEGQIVNPHDIIDDLALSPAVKRAVWQALRIVDEVAHIKKALPARIFVEVTRSNKNEKKKKDSRQKRLSDLYAAIKKDDVLLNGLNNEIFGELKSSLAKYDDAALRSKKLYLYYTQMGRCAYTGEIIELSLLNTDNYDIDHIYPRSLTKDDSFDNLVLCKRTANAQKSDAYPISEEIQKTQKPFWTFLKQQGLISERKYERLTRITPLTADDLSGFIARQLVETNQSVKAATTLLRRLYPGVDVVFVKAENVTDFRHDNNFIKVRSLNHHHHAKDAYLNIVVGNVYHERFTRNFRAFFKKNGANRTYNLAKMFNYDVNCTNAKDGKAWDVKTSMDTVKKMMDSNDVRVTKRLLEQTGALADATIYKATVAGKAKDGAYIGMKTKSSVFADVSKYGGMTKIKNAYSIIVQYTGKKGEVIKEIVPLPIYLTNRNTTDQDLINYVASIIPQAKDISIIYGKLCINQLVKVNGFYYYLGGKTNSKFCIDNAIQVIVSNEWIPYLKVLEKFNNMRKDNKDLKANVVSTRALDNKHTIEVRIVEEKNIEFFDYLVSKLKMPIYQKMKGNKAAELSEKGYGLFKKMSLEEQSIHLIELLNLLTNQKTTFEVKPLGITASRSTVGSKISNQDEFKVINESITGLYSNEVTIV

SEQ ID NO: 132 - protein, 1485 aa, Prevotella bivia
MKNILGLDLGTNSIGWAKISIDDNGKYIKDSIKLGSRIIPMSQDVLSNFSKGVTLSQTSERTSFRGARRLRERTLLRRERLHRILHLLGFLPKHYEKAIGWDRNDNKTYGKFINHAEPKLAWCKDNNGKMRFLFMDSFHDMLSEFSEKHPELLANGKKIPLDWTIYYLRKKALYKAITKEELAWILLNFNQKRGYYQLRGEEDRDSEANKKEYLELKVIGVEATGEKKGNDIWYNIHLENGWIYRRSSKNPLNDWLGKVKSFIVTTDLDADGNPKKDKDGNIKRSFRAPSEGDWTLIKKRTESLLENSGQTVGQFIYNHILEEPSAKIRGNFIRTIERKYYKDELKAILEKQKEFHHELSSESLLTECAKELYKRNIAHQEVLLKKGIIHLLLNDILFYQRPLKIKKSLIDNCPYENYKYVDKKSGDIKVKSIKCIAKSNPFFQEFRLWQFVSNLRLYRKSDDKDVTSEHLVTTDDYANLFTYLNNRKDIKQSVLLKEYFKIKKVKTINGAEYPVRWNYIDDDNKTYPCNETRYDILHALSKTELKSEWLTPERTYRLWHLLYSIESKEETKKALNKLNLSDDFTEAFLTIKPFKKEYGSYSEKAIKKLLSLMRMGYLWSEDEAIKQVGAEIEKTIEGELPDYVLQRLEKSQHNYNKISDFSGLPLWLASYIIYGRHSEAKEIIHWDNPESMMAYIKDFRQHSMRNPIVEQCVLETLRTVHDIWKEIGHIDEIHIELGREMKSTSEQRKAITQNVLHNQNTNIRIKLLLQELKNDNNITGVRPYSPMQQEILRIYEEGALQGLTKEDKDYNDILKISQTAQPTSNELTRYKLWLEQKYRSPYTGKAISLSKLFTSAYQIEHVIPQSRYFDDSLSNKVICESEVNTLKKAMLGMEFIKTCGGQKVHCTLLGDVEIYNEEDYKAFVNEHYSNNRTKRNKLLMEDIPQEFINRQLNDSRYISKMVKQLLSAIVRGQEEVEATSKFVIPCTGGITDRLKKDWGLNDIWNNLVSPRFQRMNALTGSEYFGHWENKEGKRVFQTTMPIQLQQGFSKKRIDHRHHAMDALVIACASRNIISYLNNETAQDTERRRDLRQKLCDKGGSVRKPWDSFTQDTQYALKDIIVTFKNYVRIINKATNYYEHYKTDGKKGMISQKGDELWAIRKPMHKETVFGKVNLRRPKRVSLSKAIDSVDIICNRKLKKYIKARLNEGLQKKQILNIFKELNNVWEGIDVNKIDIWEMSNDKEPMVATRKQLDTSFDEKKIRSISDTGIQKILLNYLITKNNNPELAFTPEGIQEMNSNISEYNDHKKHQPIYKVRVTEPLGAKYPIGTMGNNPKKFVEAQAGTNLYFAIYEDKEGKRNYDTIPLNIAAERLNQQLSPVPETNENNTPLKFYLSPNDLVYVPSEEERHSGNNIQLDKNRIYKMVSSTSKRCFFIHHRVAISLVDKKEFSAQNKMERSIDNEQVMIKSVCWKLITDRLGNIIKVIK

SEQ ID NO: 133 - protein, 1218 aa, Prevotella buccalis
MNKRILGLDTGTNSLGWAVVDWDEHAQSYELIKYGDVIFQEGVKIEKGIESSKAAERSGYKAIRKQYFRRRLRKIQVLKVLVKYHLCPYLSDDDLRQWHLQKQYPKSDELMLWQRTSDEEGKNPYYDRHRCLHEKLDLTVEADRYTLGRALYHLTQRRGFLSNRLDTSADNKEDGVVKSGISQLSTEMEEAGCEYLGDYFYKLYHEQGNKVRIRQRYTDRKKHYQHEFDAICEKQELSSELIEDLQRAIFFQLPLKSQRHGVGRCTFERGKPRCADSHPDYEEFRMLCFVNNIQVKGPHDLELRPLTYEEREKIEHLFFRKSKPNFDFEDIAKELAGKKNYAWIHDKEERAYKFNYRMTQGVPGCPTTAQLKSIFGDDWKTGIAETYTLIQKKNGSKSLQEMVDDVWNVLYSFSSVEKLKEFAHHKLQLDEENAEKFAKIKLSHSFAALSLKAIRKFLPFLRKGMYYTHASFFANIPTIVGKEIWNNEQSRKYIMENVGELVFNYQPKHRDVQGTIEMLIKDFLANNFELPAGATDKLYHPSMIETYPHALRNEFGILQLGSPRTNAIRNPMAMRSLHVLRRVVNQLLKESIIDENTEVHVEYARELNDANKRRAIADRQKEQDKQHKKYGDEIRKLYKEETGKDIEPTQTDVLKFQLWEEQNHYCLYTGEQIGITDFIGSNPKFDIEHTIPQSVGGDSTQMNLTLCDNRFNREVKKAKLPTELANHEEILTRIEPWKNKYEQLVKERDKQRTFAGMDKAVKDIRIQKRHKLQMEIDYWRGKYERFTMTEVPEGFSRRQGTGIGLISRYAGLYLKSLFHQADSRNKSNVYVVKGVATAEFRKMWGLQSEYEKKCRDNHSHHCMDAITIACIGKREYDLMAEYYHMEETFRQGRGSKPKFSKPWATFTEDVLNIYKNLLVVHDTPNNMPKHTKKYVQTSKGKVLAQGDTARGSLHLDTYYGAIERDGEIRYVVRRPLSSFTNPKELENIVDETVKRTIKEAIADKNFKQAIAEPIYMNEDKGILIKKVRCFANSVKQPINIRQHRDLSKKEYKQQYHVMNENNYLLAIYEGLVKNKVVREFEIVSYIEAAKYYKRSQDRNIFSSIVPTHSTKYGLPLKTKLLMGQQVLMFEENPDEIQVDNTKDLVKRLYKVVGIEKDGRIKFKHHQEARKEGLTIYSTPYKNNDDYVPIFRQSIKNINILVDGIDFNIDILGKVTLKE

SEQ ID NO: 134 - protein, 1218 aa, Prevotella timonensis
MNKRILGLDTGTNSLGWAVVDWDEHAQSYELIKYGDVIFQEGVKIEKGIESSKAAERSGYKAIRKQYFRRRLRKIQVLKVLVKYHLCPYLSDDDLRQWHLQKQYPKSDELMLWQRTSDEEGKNPYYDRHRCLHEKLDLTVEADRYTLGRALYHLTQRRGFLSNRLDTSADNKEDGVVKSGISQLSTEMEEAGCEYLGDYFYKLYDAQGNKVRIRQRYTDRNKHYQHEFDAICEKQELSSELIEDLQRAIFFQLPLKSQRHGVGRCTFERGKPRCADSHPDYEEFRMLCFVNNIQVKGPHDLELRPLTYEEREKIEPLFFRKSKPNFDFEDIAKALAGKKNYAWIHDKEERAYKFNYRMTQGVPGCPTIAQLKSIFGDDWKTGIAETYTLIQKKNGSKSLQEMVDDVWNVLYSFSSVEKLKEFAHHKLQLDEESAEKFAKIKLSHSFAALSLKAIRKFLPFLRKGMYYTHASFFANIPTIVGKEIWNKEQNRKYIMENVGELVFNYQPKHREVQGTIEMLIKDFLANNFELPAGATDKLYHPSMIETYPNAQRNEFGILQLGSPRTNAIRNPMAMRSLHILRRVVNQLLKESIIDENTEVHVEYARELNDANKRRAIADRQKEQDKQHKKYGDEIRKLYKEETGKDIEPTQTDVLKFQLWEEQNHHCLYTGEQIGITDFIGSNPKFDIEHTIPQSVGGDSTQMNLTLCDNRFNREVKKAKLPTELANHEEILTRIEPWKNKYEQLVKERDKQRTFAGMDKAVKDIRIQKRHKLQMEIDYWRGKYERFTMTEVPEGFSRRQGTGIGLISRYAGLYLKSLFHQADSRNKSNVYVVKGVATAEFRKMWGLQSEYEKKCRDNHSHHCMDAITIACIGKREYDLMAEYYRMEETFKQGRGSKPKFSKPWATFTEDVLNIYKNLLVVHDTPNNMPKHTKKYVQTSIGKVLAQGDTARGSLHLDTYYGAIERDGEIRYVVRRPLSSFTKPEELENIVDETVKRTIKEAIADKNFKQAIAEPIYMNEEKGILIKKVRCFAKSVKQPINIRQHRDLSKKEYKQQYHVMNENNYLLAIYEGLVKNKVVREFEIVSYIEAAKYYKRSQDRNIFSSIVPTHSTKYGLPLKTKLLMGQLVLMFEENPDEIQVDNTKDLVKRLYKVVGIEKDGRIKFKYHQEARKEGLPIFSTPYKNNDDYAPIFRQSINNINILVDGIDFTIDILGKVTLKE

SEQ ID NO: 135 - protein, 1487 aa, Prevotella timonensis
MKNILGLDLGSNSVGWALVKVEENGNPIGSIKMGSRIIPMSQDILGSFEKGDTVSQTAQRTLYRGKRRLIERHVLRRERLCRVLHIMNFLPAHFDRLLGWDKTDNKTYGKFIDDSEPKLAWRQNKNEMGKMEFVFMDSFHEMLSDFAKHQPQLIANGKKVPLDWTIYYLRKKALTQLISKEELAWILLNFNKKRGYYQLRGEEEEEQPTKKEEYKVLKVISVDADEGQKGNGIWYNIHLEDGGIYKKKSDIPLYDWVGKTLQLIVVTTYEKDGKTPKIFDSGKQNPSYRLPKEDDWGLVKKRTESQLQSSGKTVGAFIYDNILSKPDDKIRGNLVRTIERKYYKKELIEILQQQAKYHDELHNQNLLESCAKELYAHNDVHYNEVIKSNMINLLVNDIIFYQRPLKSKKSLIANCKYESYEYVDKETGEIKEMPIKCIAKSNPYYQEFRLWQFIHNLRLSDVVTREDVTAQYLSTPQDYCNLFTYLNDRKEIKQDILLKDFFKIKKVQIDKEKVFPIEWNYIKDATKSYPCNETRYELLSALKRAGMDKQWLDDTPNMQYRLWHLLYSVEEKEESAKALRKLYDDDKFVTSFLKIKPFNKCYGAYSEKAIKRLLTLMRMGKAWNEQAIDAKTLKCIQQIITDNVDSKLKEKIDDSRYVLHHVSDFQGLPTYLASYVIYGRHSEVTDIQCWDSPEDLLKFIRDFKQHSLRNPIVEQVILETLRVVYDIWKAEKHIDEIHVEVAREMKLTAQQRNEANLRNLNNEATNLRIKYLLEELKNDTFIKDVRPLSPIHQEKMRIYEQAVLGNLNKQDKDYDDIIKISKKEHPTNAELIRYKLWLEQRYCSPYTGKAISLSKLFTTAYEIEHIIPQSRYFDNSFNNKVICEAEVNKAKGNMLGYEFIKKQGGQKIYCTQLGKAVTILKEEAYKQFVNEHYAHNKRKRDNLLAENIPESFSSRQLNDTRYITKTIMSLLSNVVRQQSEEEATAKNLLPSSGSVTDRLKNDWGLKDVWNTIVTPRFERLNKLSGTNDFGEMKEENGNRYFQTNVPLEYEKGFKKKRIDHRHHAMDALVIACTTRNMVNYISNANANSPKQREDLRQLLCDKNRIINKPWDTFTQDALKALNDIVVSFKNNVRIINRATNRYQRYDKNGKKIIFSQKGDDMWAIRKSMHKETVFGRVNLIRKEVLPIAKALDNISAICNAQLRAYVNDLVDKHFNKKQLVAHFKSLNYKWNRQDVSKVEVWISSDNKTPMVAVRKPLDTSFDKKKIASITDTGIQTILLNYLESKGGDASVAFAPEGIQEMNSNIELYNNGKAHKPIKNVRLSEPLGAKYQVGERGAKTKKYVEADKGTNLFFAIYEDEEGKRYYYSVPLREAIERQKQKLSPVPEYNEKGVALKFYLSPNDLVYVPTEEERTMGTCHIDKARIYKMVSSTGCSCYFVPSTFAKVIVDKVELQSLNKMEKAITDECIKEVCWKLKVDRLGNIINVIK

SEQ ID NO: 136 - protein, 1138 aa, Bifidobacterium dentium
MLCRCHRRYRIGIDVGLMSVGLAAIEVDETGFPIRILNIQSVIHDGGIDPQLGKKKSISRKAISGVARRTRRMRRRKVVRLRQLDATLESLGFPIVEPDSLDTWEIWLTRAKLASSYIQDDETRKEDVSIALRHIARHRGWRNPYSNVESLFVDVAPSEQYEELRRKAEEKLGTSLSGNPTSAEIVECILKRQVGEVQLRTRSRKGVNGNAVEKEGLLPTKLMQSDNAAEIRRIFKVQRIDDETGRKLLRAVFKACSPKGSVERRVGRDALAPGLPRALKASLAFQEYRIANVLTNLVISEDGTKRKLTIAEKQRVFGFLSSNETDDITWIDVAEKLGLERRQIQGVGCLTADGEERISSTPPRNITALHIHSAKPVIREKLVAWWKAASPTVRETMVELLSNTVDIDRVREDMDYSSAVAFIDSLGDEELTALDSVDLLSGRAAYSRQTLKQLTERMLNTDDDLHEARKAVFGVDDNWKPPVDAISTSVGNPAVDRVLKIVNRYLLACQKRWRNPQSVQIEHVRESFSSVAKAKETERVQGERARYRNDLRRELCEQEGLNKIRESDIRRWESVQRQNGTCLYCGSPITFRTCEMDHIVPRKGVGSTNTRVNLAAACAACNKLKSNTAFSVWARTEGAANRKVSQRDAIERVKTFIFNKSVPPREQRAFKQAVISRLRQAESDPAIDNRSIESVAWMADELHRRIEAYFNQDADVSGNTPATQVWVFQGRVTALARKASGIEGRIHFAGEWKKTRLDRRHHAVDAAVIAMMNHSAAQTLVERDSLRLSQWITRKPETWKNYPFSEGQKKTRFKEWLDCMNALLDLLNDALDSDRVPVTRCQRMSLGNSQAHAATIRKMKRVELFSPMDADLIRRASTPALYCALTRLPEYSPEKGLPENRGREIVLNGRHIRSTETVDFFASGAAQLMVRNGSAEIGDSIHHMRIYRYRKTGAKSQEYVYGMIRVFQIDLLHASSENLFAVQLPSQSVSVRYGDKNVVQAIQEGRAEYLGHIVPNDEILISYEGVRMKDSEKIGAYANDFSGTASELAQRRHWVVVGSDVSKLALRPSYLSEEGLENSGSESERLSKQTRKVIEGKGWVVAVNILAKYHPVVIRRNALGEPRFRTNSGMPVSWRWDR

SEQ ID NO: 137 - protein, 587 aa, Neisseria subflava
MATSRSRIRSQTDAFGVVGSLVAFNQTSRLFVAKKNEGETADKELGALLKGVADNAHALQTGNFRTPAELALNKFEKESGHIRNQRGDYSHTFNRKDLQAELNLLFEKQKEFGNPHVSDGLKEGIETLLMAQRPALSGDAVQKMLGYCTFEPTEPKAAKNTYTAGRFIWLTKLNNLRILEQGSERPLTTTERATLMDEPYRKSKLTYAQARKLLGLEDTAFFKGLRYGKDNAEASTLMEMKAYHAISRALEKEGLKDKKSPLNLSPELQDEIGTAFSLFKTDEDITGRLKDRVQPEILEALLKHISFDKFVQISLKALRRIVPLMEQGKRYDEACAEIYGDHYGKKNAEEKIYLPPIPADEIRNPVVLRALSQARKVINAVVRRYGSPARIHIETAREVGKSFKDRKEIEKRQEENRKDREKAAAKFREYFPNFVGEPKSKDILKLRLYEQQHGKCLYSGKEINLGRLNEKGYIEIDHALPFSRTWDDSFNNKVLVLGSENQNKGNQTPYEYFNGKDNSREWQEFKARVETSRFPRSKKQRILLQKFDEDGIYRIGVKTALSFPKYQIDELGKEIRPCRLKKRPPVR

SEQ ID NO: 138 - protein, 1269 aa, Mycoplasma gallisepticum
MNNSIKSKPEVTIGLDLGVGSVGWAIVDNETNIIHHLGSRLFSQAKTAEDRRSFRGVRRLIRRRKYKLKRFVNLIWKYNSYFGFKNKEDILNNYQEQQKLHNTVLNLKSEALNAKIDPKALSWILHDYLKNRGHFYEDNRDFNVYPTKELAKYFDKYGYYKGIIDSKEDNDNKLEEELTKYKFSNKHWLEEVKKVLSNQTGLPEKFKEEYESLFSYVRNYSEGPGSINSVSPYGIYHLDEKEGKVVQKYNNIWDKTIGKCNIFPDEYRAPKNSPIAMIFNEINELSTIRSYSIYLTGWFINQEFKKAYLNKLLDLLIKTNGEKPIDARQFKKLREETIAESIGKETLKDVENEEKLEKEDHKWKLKGLKLNTNGKIQYNDLSSLAKFVHKLKQHLKLDFLLEDQYATLDKINFLQSLFVYLGKHLRYSNRVDSANLKEFSDSNKLFERILQKQKDGLFKLFEQTDKDDEKILAQTHSLSTKAMLLAITRMTNLDNDEDNQKNNDKGWNFEAIKNFDQKFIDITKKNNNLSLKQNKRYLDDRFINDAILSPGVKRILREATKVFNAILKQFSEEYDVTKVVIELARELSEEKELENTKNYKKLIKKNGDKISEGLKALGISEDEIKDILKSPTKSYKFLLWLQQDHIDPYSLKEIAFDDIFTKTEKFEIDHIIPYSISFDDSSSNKLLVLAESNQAKSNQTPYEFISSGNAGIKWEDYEAYCRKFKDGDSSLLDSTQRSKKFAKMMKTDTSSKYDIGFLARNLNDTRYATIVFRDALEDYANNHLVEDKPMFKVVCINGSVTSFLRKNFDDSSYAKKDRDKNIHHAVDASIISIFSNETKTLFNQLTQFADYKLFKNTDGSWKKIDPKTGVVTEVTDENWKQIRVRNQVSEIAKVIEKYIQDSNIERKARYSRKIENKTNISLFNDTVYSAKKVGYEDQIKRKNLKTLDIHESAKENKNSKVKRQFVYRKLVNVSLLNNDKLADLFAEKEDILMYRANPWVINLAEQIFNEYTENKKIKSQNVFEKYMLDLTKEFPEKFSEFLVKSMLRNKTAIIYDDKKNIVHRIKRLKMLSSELKENKLSNVIIRSKNQSGTKLSYQDTINSLALMIMRSIDPTAKKQYIRVPLNTLNLHLGDHDFDLHNMDAYLKKPKFVKYLKANEIGDEYKPWRVLTSGTLLIHKKDKKLMYISSFQNLNDVIEIKNLIETEYKENDDSDSKKKKKANRFLMTLSTILNDYILLDAKDNFDILGLSKNRIDEILNSKLGLDKIVK

SEQ ID NO: 139 - protein, 1354 aa, Prevotella melaninogenica
MADFAKYQPGMVADGRKIPLDWTLYYLRKKALTQAIRKEELAWILLNFNQKRGYYQLRGEEEEENSTKHEEYYELKVVSVEAAEEGKGGNTWYNVTLENGWIYRRQSKIELNDWVGKVRPFIVTTEYEIDGVTIKKDKNGEVKRSFRAPSENDWGLRKKRTESLLEESGKTVGAFIYNHILSEPADKIRGNFIRTIERKFYKKELEAILREQSKHQKELKDIDTLIACIKELYPNNKPHQDSLIKKDMTYLLITDLIFYQRPLKSKKSLIADCPYEYYEYVIKETGENKRQSIKCIAKSNPYYQEFRLWQFIINLRLFDRNNDKEVTSEYLSSMEDYTRLFTYLNDRKDINQETLLKDFFKQKKVKRGMEKEFPIRWNYIEDKEKKYPCNETRHELLTALGKVGIDHSWLDDKELFYRLWHLLYSVESKEEAEGALRKLVDNDDFVNAFLKIKPFKKEYGAYSEKAIKKLLAVMRMGNLWNEVDICEQTRDRIQNIIKGDIDEKIKDRMGRTFSQLSDFQGLPEWLACYVVYGQHSEATDIQRWTKPENLMAYINGFKQHSLRNPIVEQCILETLRTVHDIWKEAGHIDEIHIELGRGMKSTADQRARMSKSIMQNENTNLRIKSLLMELKNAKEFENVRPYSPMQQEILRIYEEGALQELTKEDAQYNEISKISQMAQPSANELLKYRLWLEQKYCSPYTGKPISLSKLFTSAYQIEHIIPQSRYFDDSFTNKVICEAEVNQLKSNMLGYEFIKKHGGEIVRCTMIGDVKLLDAKEYYNFVTEHYTNNRRKKEKLLMEDIPQEFLNRQMNDSRYISKKVMAILSNIVREEDEQEAKSKFVIACSGGITDRLKQDWGLNDVWNSIVYPRFERLNKLTNTENFGRWENKKGKQVFQTSVPLELQKDFSKKRIDHRHHAMDALVIACASNNIINYLNNESAKSQEKREDLRKKLCDKNRIIRKPWETFTQDAHTALENVVVSFKNYIRVINKATNYYEKYDKNGKKEIAEQKGQDMWAIRKPMHKETVFGQVNLRRKITIKLKDALEKIPAICDKELRDYINILVAKQFNKKQILAHFKSINYRLNMKSVDKVDVWQFSNEKEPMVATRKSVDTSFDTKRIATITDTGIQKILLNYLKAKNNDPNIAFTPEGIAEMNKHITEYNNGKQHQPILKVRVSEPKGAKYQVGETGNKRSKFVEAQKGTNLYFAIYEDKEGNRSYNTIPLNEVIERLKQGLSPVPDANEKSIPLKFHLSPNDLVYVPKTDEENEIKMGQIYKFVDSSGTTANFVPHRVSNLIYNVDKKIAENFCNHEIIQNEYGIGSPQSKNQKSITGEMIKAVCWKLEVDRLGNIHKIIK

SEQ ID NO: 140 - protein, 1130 aa, Streptococcus gallolyticus
MTNGKILGLDIGIASVGVGIIEAKTGKVVHANSRLFSAANAENNAERRGFRGSRRLNRRKKHRVKRVRDLFEKYEIVTDFRNLNLNPYELRVKGLTEQLTNEELFAALRTISKRRGISYLDDAEDDSTGSTDYAKSIDENRRLLKTKTPGQIQLERLEKYGQLRGNFTVYDENGEAHRLINVFSTSDYEKEARKILETQADYNKKITAEFIDDYVEILTQKRKYYHGPGNEKSRTDYGRFRTDGTTLENIFGILIGKCSFYPDEYRASKASYTAQEYNFLNDLNNLKVPTETGKLSTEQKEALVEFAKSTATLGPAKLLKEIAKILDCKVDEIKGYREDDKGKPDLHTFEPYRKLKFNLDSVNIDDLSREVLDKLADILTLNTEREGIEDAIRHNLPNQFTEGQISEIIKVRKSQSTAFNKGWHSFSAKLMNELIPELYATSDEQMTILTRLEKFKVNKKSSKNTKTIDEKEVTDEIYNPVVAKSVRQTIKIINAAVKKYGDFDKIVIEMPRDKNADDEKKFIDKRNKENKKEKDDALKRAAYLYNGTDKLPDEVFHGNKQLETKIRLWYQQGERCLYSGKPIPIQELVHNSNNFEIDHILPLSLSFDDSLANKVLVYAWTNQEKGQKTPYQVIDSMDAAWSFREMKDYVLKQKGLGKKKRDYLLTTENIDKIEVKKKFIERNLVDTRYASRVVLNSLQSALRELGKDTKISVIRGQFTSQLRRKWKIDKSRETYHHHAVDALIIAASSQLKLWEKQDNPMFVDYGNNQVVDKQTGEILSVSDDEYKELVFQPPYQGFVNMISSKGFEDEILFSYQVDSKYNRKVSDATIYSTRKAKIGKDKKEETYVLGKIKDIYSQNGFDTFIKKYNKDKTQFLMYQKDPLTWENVIEVILRDYPTTKKSEDGKNDVKCNPFEEYRRENGLVCKYSKKGKGTPIKSLKYYDKKLGNCIDITPEGSKNEVVLQSLNPWRADVYFNPETLKYELLGLKYSDLSFEKGTGKYHISQEKYDVIKEKEGIGKKSEFKFTLYRNDLILIKDTASGEQEIYRFLSRTMPNVKHYAELKPYDKEKFDNVQELVEALGEADKVGRCIKGLNKSNLSIYKVRTDVLGNKYFVKKEGDKPKLDFKNNKK

SEQ ID NO: 141 - protein, 1371 aa, Streptococcus gallolyticus
MTEKNYSIGLDIGTNSVGWAVITDDYKVPAKKMKVLGNTDKKYIKKNLLGALLFDNGETAEATRLKRTARRRYTRRKNRLRYLQEIFAEEMAKVDESFFYRLDESFLTTDDKDFERHPIFGNKADEIKYHQEFPTIYHLRKHLADSHEKADLRLIYLALAHMIKFRGHFLIEGELNAENTDVQKLFEAFVEVYDRTFDDSNLSEITVDASSILTEKFSKSRRLENLIKHYPTEKKNTLFGNLVALALGLQPNFKTSFKLSEDAKLQFSKDTYEEDLEELIGKIGDEYADLFTSAKNLYDAILLSGILTVADNTTKAPLSASMIKRYNEHQVDLKKLKEFIKNNASDKYDEIFNDKDKNGYAGYIENGVKQDEFYKYLKTTLSKIDGSDYFLDKIEREDFLRKQRTFDNGSIPHQIHLQEMHAILRRQGEHYAFLKENQAKIEKILTFRIPYYVGPLARKNSRFAWAEYHSDEKITPWNFDEIIDKEKSAEKFITRMTLNDLYLPEEKVLPKHSLVYETYTVYNELTKVKYVNEQGKSNFFDANMKQEIFEHVFKENRKVTKDKFLNYLNKEFPEYRIQDLIGLDKENKSFNASLGTYHDLKKILDKSFLDDKTNETIIEDIIQTLTLFEDRDMIRQRLQKYSDIFTPQQLKKLERRHYTGWGRLSYKLINGIRNKENGKSILDYLIDDGYANRNFMQLISDDTLPFKQIIKDAQIIGDIDDVTSVVRELPGSPAIKKGILQSVKIVDELVKVMGHNPDNIVIEMARENQTTNRGRNQSQQRLKKLQDSLKELGSNILNEEKPSYIEGKVENNHLQDDRLFLYYIQNGKDMYTGDELDIDHLSDYDIDHIIPQAFIKDDSIDNRVLTSSAKNRGKSDDVPSLDIVHDRKADWIRLYKSGLISKRKFDNLTKAERGGLTENDKAGFIKRQLVETRQITKHVAQILDSRFNTERDENDKVIRNVKVITLKSNLVSQFRKDFKFYKVREINDYHHAHDAYLNAVVGTALLKKYPKLAPEFVYGEYKKYDIRKFITSSGDKATAKYFFYSNLMNFFKRVIRYSNGKVVVRPVIECSKDTGEIAWNKQTDFEKVRRVLSYPQVNIVKKVETQTGGFSKESILPKGNSDKLIPRKTKKFRWDTPKYGGFDSPNIAYSVFVIADVEKGKAKKLKTVKELVGISIMERSSFEENPVVFLEKKGYQNVQEDNLIKLPKYSLFEFEGGRRRLLASASELQKGNEVVLSRHLVELLYHAHRVNSFNNSEHLKYVSEHKKEFGEVLSCVENFAKSYVDVEKNLGKIRAVADKIDTFSIEDISISFVNLLTLTALGAPADFNFLGEKIPRKRYTSTKECLNATLIHQSITGLYETRIDLSKLGEE

SEQ ID NO: 142 - protein, 1168 aa, Azospirillum sp.
MARPAFRAPRREHVNGWTPDPHRISKPFFILVSWHLLSRVVIDSSSGCFPGTSRDHTDKFAEWECAVQPYRLSFDLGTNSIGWGLLNLDRQGKPREIRALGSRIFSDGRDPQDKASLAVARRLARQMRRRRDRYLTRRTRLMGALVRFGLMPADPAARKRLEVAVDPYLARERATRERLEPFEIGRALFHLNQRRGYKPVRTATKPDEEAGKVKEAVERLEAAIAAAGAPTLGAWFAWRKTRGETLRARLAGKGKEAAYPFYPARRMLEAEFDTLWAEQARHHPDLLTAEAREILRHRIFHQRPLKPPPVGRCTLYPDDGRAPRALPSAQRLRLFQELASLRVIHLDLSERPLTPAERDRIVAFVQGRPPKAGRKPGKVQKSVPFEKLRGLLELPPGTGFSLESDKRPELLGDETGARIAPAFGPGWTALPLEEQDALVELLLTEAEPERAIAALTARWALDEATAAKLAGATLPDFHGRYGRRAVAELLPVLERETRGDPDGRVRPIRLDEAVKLLRGGKDHSDFSREGALLDALPYYGAVLERHVAFGTGNPADPEEKRVGRVANPTVHIALNQLRHLVNAILARHGRPEEIVIELARDLKRSAEDRRREDKRQADNQKRNEERKRLILSLGERPTPRNLLKLRLWEEQGPVENRRCPYSGETISMRMLLSEQVDIDHILPFSVSLDDSAANKVVCLREANRIKRNRSPWEAFGHDSERWAGILARAEALPKNKRWRFAPDALEKLEGEGGLRARHLNDTRHLSRLAVEYLRCVCPKVRVSPGRLTALLRRRWGIDAILAEADGPPPEVPAETLDPSPAEKNRADHRHHALDAVVIGCIDRSMVQRVQLAAASAEREAAAREDNIRRVLEGFKEEPWDGFRAELERRARTIVVSHRPEHGIGGALHKETAYGPVDPPEEGFNLVVRKPIDGLSKDEINSVRDPRLRRALIDRLAIRRRDANDPATALAKAAEDLAAQPASRGIRRVRVLKKESNPIRVEHGGNPSGPRSGGPFHKLLLAGEVHHVDVALRADGRRWVGHWVTLFEAHGGRGADGAAAPPRLGDGERFLMRLHKGDCLKLEHKGRVRVMQVVKLEPSSNSVVVVEPHQVKTDRSKHVKISCDQLRARGARRVTVDPLGRVRVHAPGARVGIGGDAGRTAMEPAEDIS

SEQ ID NO: 143 - protein, 1345 aa, Streptococcus mutans
MKKPYSIGLDIGTNSVGWAVVTDDYKVPAKKMKVLGNTDKSHIKKNLLGALLFDSGNTAADRRLKRTARRRYTRRRNRILYLQEIFAEEMSKVDDSFFHRLEDSFLVTEDKRGERHPIFGNLEEEVKYHENFPTIYHLRQYLADNPEKVDLRLVYLALAHIIKFRGHFLIEGKFDTRNNDVQRLFQEFLAVYDNTFENSSLQEQNVQVEEILTDKISKSAKKDRVLKLFPNEKSNGRFAEFLKLIVGNQADFKKHFELEEKAPLQFSKDTYEEELEVLLAQIGDNYAELFLSAKKLYDSILLSGILTVTDVSTKAPLSASMIQRYNEHQMDLAQLKQFIRQKLSDKYNEVFSDVSKDGYAGYIDGKTNQEAFYKYLKGLLNKIEGSGYFLDKIEREDFLRKQRTFDNGSIPHQIHLQEMRAIIRRQAEFYPFLADNQDRIEKILTFRIPYYVGPLARGKSDFAWLSRKSADKITPWNFDEIVDKESSAEAFINRMTNYDLYLPNQKVLPKHSLLYEKFTVYNELTKVKYKTEQGKTAFFDANMKQEIFDGVFKVYRKVTKDKLMDFLEKEFDEFRIVDLTGLDKENKAFNASYGTYHDLRKILDKDFLDNSKNEKILEDIVLTLTLFEDREMIRKRLENYSDLLTKEQVKKLERRHYTGWGRLSAELIHGIRNKESRKTILDYLIDDGNSNRNFMQLINDDALSFKEEIAKAQVIGETDNLNQVVSDIAGSPAIKKGILQSLKIVDELVKIMGHQPENIVVEMARENQFTNQGRRNSQQRLKGLTDSIKEFGSQILKEHPVKHSQLQNDRLFLYYLQNGRDMYTGEELDIDYLSQYDIDHIIPQAFIKDNSIDNRVLTSSKENRGKSDDVPSKNVVRKMKSYWSKLLSAKLITQRKFDNLTKAERGGLTDDDKAGFIKRQLVETRQITKHVARILDERFHTETDENNKKIRQVKIVTLKSNLVSNFRKEFELYKVREINDYHHAHDAYLNAVIGKALLGVYPQLEPEFVYGDYPHFHGHKENKATAKKFFYSNIMNFFKKDDVRTDKNGEIIWKKDEHISNIKKVLSYPQVNIVKKVEEQTGGFSKESILPKGNSDKLIPRKTKKFYWDTKKYGGFDSPIVAYSILVIADIEKGKSKKLKTVKALVGVTIMEKMTFERDPVAFLERKGYRNVQEENIIKLPKYSLFKLENGRKRLLASARELQKGNEIVLPNHLGTLLYHAKNIHKVDEPKHLDYVDKHKDEFKELLDVVSNFSKKYTLAEGNLEKIKELYAQNNGEDLKELASSFINLLTFTAIGAPATFKFFDKNIDRKRYTSTTEILNATLIHQSITGLYETRIDLSKLGGD

SEQ ID NO: 144 - protein, 1024 aa, Helicobacter mustelae
MIRTLGIDIGIASIGWAVIEGEYTDKGLENKEIVASGVRVFTKAENPKNKESLALPRTLARSARRRNARKKGRIQQVKHYLSKALGLDLECFVQGEKLATLFQTSKDFLSPWELRERALYRVLDKEELARVILHIAKRRGYDDITYGVEDNDSGKIKKAIAENSKRIKEEQCKTIGEMMYKLYFQKSLNVRNKKESYNRCVGRSELREELKTIFQIQQELKSPWVNEELIYKLLGNPDAQSKQEREGLIFYQRPLKGFGDKIGKCSHIKKGENSPYRACKHAPSAEEFVALTKSINFLKNLTNRHGLCFSQEDMCVYLGKILQEAQKNEKGLTYSKLKLLLDLPSDFEFLGLDYSGKNPEKAVFLSLPSTFKLNKITQDRKTQDKIANILGANKDWEAILKELESLQLSKEQIQTIKDAKLNFSKHINLSLEALYHLLPLMREGKRYDEGVEILQERGIFSKPQPKNRQLLPPLSELAKEESYFDIPNPVLRRALSEFRKVVNALLEKYGGFHYFHIELTRDVCKAKSARMQLEKINKKNKSENDAASQLLEVLGLPNTYNNRLKCKLWKQQEEYCLYSGEKITIDHLKDQRALQIDHAFPLSRSLDDSQSNKVLCLTSSNQEKSNKTPYEWLGSDEKKWDMYVGRVYSSNFSPSKKRKLTQKNFKERNEEDFLARNLVDTGYIGRVTKEYIKHSLSFLPLPDGKKEHIRIISGSMTSTMRSFWGVQEKNRDHHLHHAQDAIIIACIEPSMIQKYTTYLKDKETHRLKSHQKAQILREGDHKLSLRWPMSNFKDKIQESIQNIIPSHHVSHKVTGELHQETVRTKEFYYQAFGGEEGVKKALKFGKIREINQGIVDNGAMVRVDIFKSKDKGKFYAVPIYTYDFAIGKLPNKAIVQGKKNGIIKDWLEMDENYEFCFSLFKNDCIKIQTKEMQEAVLAIYKSTNSAKATIELEHLSKYALKNEDEEKMFTDTDKEKNKTMTRESCGIQGLKVFQKVKLSVLGEVLEHKPRNRQNIALKTTPKHV

SEQ ID NO: 145 - protein, 765 aa, Butyrivibrio fibrisolvens
MGITIGLDLGVASVGWAVVNDDYEILESCSNIFPSADASKNSERRGFRQGRRLTRRRKNRIHDFQKLWEDKGFVIPSQGTEDVLAIKIKGLSEKLSVDEVYWVLLNSLKHRGISYLDDADSGDNSSDYAKSISRNEEELKEKLPCEIQWERLQKYGAYRGNISIVEDGEPITLRNVFTTSAYKKEVEQFIDTQAKYNAQYSGDFKADYLEIFNRKREYYEGPGNELSRTDYGKYTTEINADGEYITVDNIFDKLVGKCSVNPDERRAAGASYTAQEFNVLNDLNNLTISSESSFIEDGKLTEDAKRKIIETIKNAKTVNVKKIICDVIGDKKCQISGARIDKNEKEIFHSFEAYNKMRRALEEIGFDISSLSRENLDLIGDILTLNTDRESILNAFNRKGIELADEAKDILVKVRKTNGSLFNKWQSFGLSIMNELIPELYAQPKNQMELLTAMGVFKSRGDRFLECKEIPGDLIVDDIYNPVVSKTVRITVRILNALIKKYGYPDRVVIEMPRDKNSDEEQQRLKKEQRDNENEIKDIKARVKTEYGREITEEDFRQHSKLSLKLKLWNEQQGICPYSGKSIKIDDLLDNPNLFEVDHIIPLSISFDDSRNNKVLVYSSENQDKGNRTPLAYLASVNRQWDIHSFMDYVLKTYAGAQKRKKRDNLLNEQDITKVEVLQGFVNRNINDTRYASKVVLNSLQEYFSSKECSTKVKVIRGSFTHQMRVNLKLKKTVMNHMFIMQLMQCLLLFHRWDMTLIMNLQISI

SEQ ID NO: 146 - protein, 1338 aa, Coprococcus catus
MKQEYFLGLDMGTGSLGWAVTDSTYQVMRKHGKALWGTRLFESASTAEERRMFRTARRRLDRRNWRIQVLQEIFSEEISKVDPGFFLRMKESKYYPEDKRDAEGNCPELPYALFVDDNYTDKNYHKDYPTIYHLRKMLMETTEIPDIRLVYLVLHHMMKHRGHFLLSGDISQIKEFKSTFEQLIQNIQDEELEWHISLDDAAIQFVEHVLKDRNLTRSTKKSRLIKQLNAKSACEKAILNLLSGGTVKLSDIFNNKELDESERPKVSFADSGYDDYIGIVEAELAEQYYIIASAKAVYDWSVLVEILGNSVSISEAKIKVYQKHQADLKTLKKIVRQYMTKEDYKRVFVDTEEKLNNYSAYIGMTKKNGKKVDLKSKQCTQADFYDFLKKNVIKVIDHKEITQEIESEIEKENFLPKQVTKDNGVIPYQVHDYELKKILDNLGTRMPFIKENAEKIQQLFEFRIPYYVGPLNRVDDGKDGKFTWSVRKSDARIYPWNFTEVIDVEASAEKFIRRMTNKCTYLVGEDVLPKDSLVYSKFMVLNELNNLRLNGEKISVELKQRIYEELFCKYRKVTRKKLERYLVIEGIAKKGVEITGIDGDFKASLTAYHDFKERLTDVQLSQRAKEAIVLNVVLFGDDKKLLKQRLSKMYPNLTTGQLKGICSLSYQGWGRLSKTFLEEITVPAPGTGEVWNIMTALWQTNDNLMQLLSRNYGFTNEVEEFNTLKKETDLSYKTVDELYVSPAVKRQIWQTLKVVKEIQKVMGNAPKRVFVEMAREKQEGKRSDSRKKQLVELYRACKNEERDWITELNAQSDQQLRSDKLFLYYIQKGRCMYSGETIQLDELWDNTKYDIDHIYPQSKTMDDSLNNRVLVKKNYNAIKSDTYPLSLDIQKKMMSFWKMLQQQGFITKEKYVRLVRSDELSADELAGFIERQIVETRQSTKAVATILKEALPDTEIVYVKAGNVSNFRQTYELLKVREMNDLHHAKDAYLNIVVGNAYFVKFTKNAAWFIRNNPGRSYNLKRMFEFDIERSGEIAWKAGNKGSIVTVKKVMQKNNILVTRKAYEVKGGLFDQQIMKKGKGQVPIKGNDERLADIEKYGGYNKAAGTYFMLVKSLDKKGKEIRTIEFVPLYLKNQIEINHESAIQYLAQERGLNSPEILLSKIKIDTLFKVDGFKMWLSGRTGNQLIFKGANQLILSHQEAAILKGVVKYVNRKNENKDAKLSERDGMTEEKLLQLYDTFLDKLSNTVYSIRLSAQIKTLTEKRAKFIGLSNEDQCIVLNEILHMFQCQSGSANLKLIGGPGSAGILVMNNNITACKQISVINQSPTGIYEKEIDLIKL

SEQ ID NO: 147 - protein, 1035 aa, Candidatus Puniceispirillum
MRRLGLDLGTNSIGWCLLDLGDDGEPVSIFRTGARIFSDGRDPKSLGSLKATRREARLTRRRRDRFIQRQKNLINALVKYGLMPADEIQRQALAYKDPYPIRKKALDEAIDPYEMGRAIFHINQRRGFKSNRKSADNEAGVVKQSIADLEMKLGEAGARTIGEFLADRQATNDTVRARRLSGTNALYEFYPDRYMLEQEFDTLWAKQAAFNPSLYIEAARERLKEIVFFQRKLKPQEVGRCIFLSDEDRISKALPSFQRFRIYQELSNLAWIDHDGVAHRITASLALRDHLFDELEHKKKLTFKAMRAILRKQGVVDYPVGFNLESDNRDHLIGNLTSCIMRDAKKMIGSAWDRLDEEEQDSFILMLQDDQKGDDEVRSILTQQYGLSDDVAEDCLDVRLPDGHGSLSKKAIDRILPVLRDQGLIYYDAVKEAGLGEANLYDPYAALSDKLDYYGKALAGHVMGASGKFEDSDEKRYGTISNPTVHIALNQVRAVVNELIRLHGKPDEVVIEIGRDLPMGADGKRELERFQKEGRAKNERARDELKKLGHIDSRESRQKFQLWEQLAKEPVDRCCPFTGKMMSISDLFSDKVEIEHLLPFSLTLDDSMANKTVCFRQANRDKGNRAPFDAFGNSPAGYDWQEILGRSQNLPYAKRWRFLPDAMKRFEADGGFLERQLNDTRYISRYTTEYISTIIPKNKIWVVTGRLTSLLRGFWGLNSILRGHNTDDGTPAKKSRDDHRHHAIDAIVVGMTSRGLLQKVSKAARRSEDLDLTRLFEGRIDPWDGFRDEVKKHIDAIIVSHRPRKKSQGALHNDTAYGIVEHAENGASTVVHRVPITSLGKQSDIEKVRDPLIKSALLNETAGLSGKSFENAVQKWCADNSIKSLRIVETVSIIPITDKEGVAYKGYKGDGNAYMDIYQDPTSSKWKGEIVSRFDANQKGFIPSWQSQFPTARLIMRLRINDLLKLQDGEIEEIYRVQRLSGSKILMAPHTEANVDARDRDKNDTFKLTSKSPGKLQSASARKVHISPTGLIREG

SEQ ID NO: 148 - protein, 1270 aa, Mycoplasma gallisepticum
MNNSIKSKPEVTIGLDLGVGSVGWAIVDNETNIIHHLGSRLFSQAKTAEDRRSFRGVRRLIRRRKYKLKRFVNLIWKYNSYFGFKNKEDILNNYQEQQKLHNTVLNLKLEALNAKIDPKALSWILHDYLKNRGHFYEDNRDFNVYPTEELANYFDEFGYYKGIIDSKNDDDDKLEEGLTKYKFSNQHWLEEVKKVLSNQTGLPEKFKEEYESLFSYVRNYSEGPGSINSVSPYGIYHLDEKEGKVVQKYNNIWDKTIGKCSIFPDEYRAPKNSPIAMIFNEINELSTIRSYSIYLTGWFINQEFKKAYLNKLLDLLIKTNSEKPIDARQFKKLREETIAESIGKETLKDVESEEKLEKDDHKWKLKGLKLNTNGKIQYNDLSSLAKFVHKLKQHLKLDFLLEDQYTPLDKINFLQSLYVYLGKHLRYSNRVDSANLKEFSDSSRLFERVLQEQKDGLFKLFEQTDKDDEKILTQTHSLSTKAMLLAITRMTNLDNDEDNQKNNDKGWNFEAIKNFDQKFIDITKTNNNLSLKQDKRYLDDQFINDAILSPGVKRILREATKVFNAILKQFSEEYDVTKVVIELARELSEEKELENTKNYKKLIKKNGDKISEGLKALGIAEDKIEEILKSPTKSYKVLLWLQQDHIDPYSQKEIAFDDILTKTEKTEIDHIIPYSISFDDSSSNKLLVLAESNQAKSNQTPYEFINSGKAEITWEVYEAYCHKFKNGDSSLLDSTQRSKKFAKMMKTDTSSKYDIGFLARNLNDTRYATIVFRDALKDYANNHLVEDKPMFKVVCINGGVTSFLRKNFDPKSWYAKKDRDKNIHHAVDASIISIFSNETKTLFNQLTKFADYKLFKNTDGSWKKIDPKTGVVSEVTDENWKQIRVRNQVSEIAKVIDKYIQDSNIERKARYSRKIENKTNISLFNDTVYSAKKVGYEDQIKRKNLKTLDIHESAEENKNSKVKKQFVYRKLVNVSLLNNDKLADLFAEKEDILMYRANPWVINLAEQIFNEYTENKKIKSQNVFEKYMLDLTKEFPEKFSEAFVKSMIRNKTAIIYNVEKDVVHRIKRLKILSSELKENKWSNVIIRSKNESGTKLSYQDTINSIALMIMRSIDPTAKKQYIRVPLNTLNLHLGDQDFDLHNIDAYLKKPKFVKYLKANEIGDEYKPWRVLTSGTLLIHKKDKKLMYISSFQNLNDLIEIKNLIETEYKENVDSDPKKKKKASQILRSLSVILNDYILLDAKYNFDILGLSKNKIDEILNSKLDLDKIAK

SEQ ID NO: 149 - protein, 1204 aa, Prevotella ruminicola
MERILGIDTGTNSLGWAIVDKDENQYHLVAKGTNIFSEGVKIEKGIESSKAAERTEHRSVRKHYWRRKIRKIRLLTILSDNDLCPRLKHEQLRQWRLKKVYPTDDTFMEWQRTEDKAQVNPYKFRYICLTQKLDLSDITQRFILGRALYHLNQRRGFLSNRKEATKESEGTVKEGISSLSKDMKDSGCEYLGEYFYQLYQQGKKIRNHYTARKEHYLKEFKAICSKQELDDALIEKLEKAIFDQRPLKSQKGQVGTCTFEKGKSRCPSSHPLYEDFRMYSFINNIKVQVDTLYDKGERSLTDEEKQLIIPLFKRKSKRTFPFEDIAKKIAGKNNYCYIKSNEEKAYKFNYQMDTQVSGSPVNAQLEEIFGEDWLSSVCEVYTLANNKSRFQIMNDVWHVLFFYDDEDKLKEFAKDRLQLDDELAEKFSKISIPNDYAALSLKAIRKIMPYLRDYGLIYSEAVFLANLVDVLPQHVWGIKEMREAAIENVIDVMHSYDKNNIDGITLEGCVKTFLKERYQVSDDNLKKLYHPSMLDPYPRQRPNDEGVFQLGSPRISSVKNPMAMHSLFRLRKVVNLMLKKGYITPDTKVHIEFSRDLNDANKRWAIQTWQRENEKERERCRKEIEKYIASPSDTDILKYQLWEEQNHKCLYTGDEIRITDFLGDNPKYDIEHTIPRSAGGDSTKMNLTLCSSRFNRDEKKTKLPAELVNHDEILERISNWKEKYEDIDKQIRKISTKGATSKEDKDSKIRRRHYLILQRDYWRGKYQRFTMTEVPEGFSRRQGTDISVISRYARMYLKSVFKQVYIVKGIATSDFRKMWGIQDEYAKKERVNHVHHCIDAITIACIGKAEYDKLADYRHQYDDYLFQGKTKPTFDKPWPSFVIDIKHIQDELLIAHYAKDNLEKFTKKNLRGKDGRIIRDKFGNKLQMKGDTSRNSLHNDKFYGAINHEGEIKYVYRTNIEALDAKSIGNIVDPTVRSIIESAIAIHGSLKAAINKGIWMNEEKHIPIKKVRVFRNDVKKPIELKDQRDLSDKDYKQHYYVTNDGNYMMLIFSKLNNKGREIRQHVVINSLEATEVIKSHKRSQVGKVVWESYYSKEGFDLIYKLKSGTMILLYENNRDEVWDLDIRNLQKRLYIITKMKYDGRIYMMHHQEAREKKDLEEKSGSFKINEDYRPLIVNSYNQFNALVQDLDFEINDLGEIRRLI

SEQ ID NO: 150 - protein, 1178 aa, Scardovia inopinata
MGKRHNSNMAKKKISYRIGIDVGLNSTGLAAIEVDDDGAPIRILNTMSVIHDGGVDPDAAKVRGTRLAISGIARRTRRMRRRRAKRLDRLEQILEKYGYTDTEPVLEEPYGPWICRAELADGFINDDEQRRMMIGIAIRHIARHRGWRNPYQNVRALLNIDDSDLSEEYKNLKEKVQDQINDGKDLPNFTPSQLVRDYLDNFSGQPAARIRTGKAGPRGNRRDAVGILPQRMRQSDYAYELQRIFDMQKIGRDEAQELLMAVFEAKSPKGSAEKRIGKDPLTGKKRALKASLAFQKYRIVATITNLRIKTGTGSERMLSPTELNDIYTYLLRVQDDNHLPTWEDICEEVLHIGRYQLAGIGKTFEGGERISNMPPVIQTSLAIHGLSEGTLAEKLTKWWDKADDDSRESMIKLLSNTVDIDRVNEVDENFASALDFIDSLDDEELTKLDKIALPRGRAAYSEEALNKLTADMLNTGDDLFSARQRIYHVNNSWRPPQPPIGEPLGNPAVDRVLKITNRYLMNCLNRWGQPRRVTIEHTRSGFTSVKQATEHQKISDKRAEYRRDIVKQLEEAGVESVHEYDIRRWEAVQRQNGQCLYCGRDITFKTCEMDHIVPRKGPGSTNTRTNFAAVCPECNRMKSNIPFASWAETKEAKDRGVSLDKAIKQVRFFNFTKNEYSPQAQRNFKKSMIERLKQKTSDEPLDNRSIESVSWMADELYKRIDWYFNHEQYETSKKAINDDKDNLSGTQVVVYPGSITAEARNAAGLGGNIHFIGGRYKTRLDRRHHAVDACVIAMMEPGIARILTERNQLRQAQRLTARIEDDEVNWKDYPTENTAGYNKYQAWSDRMHALLEYMNNALDYDKIPVVRWERLQLGNRSAHEDTIHPLKKLPLSHEISAIDINHASTPALYEALVSLPDFSEQDGLPADPSRQINVNGERYSGDDLVSFFNSNAAQIAIQGGSAELGTAFHHARIYRCWTVGKNGKKKIFFGMIRVYQHDLLHAKNEDLFTYPLKRSSVSMRYAKKEVVHAILSGNAEYVGYLCVGDELVLDLKGDKSNDEGGSRLSGQVGEFVQKFEEDSKVNSQIVNRWTVDGFPDEAKLRLRPSMFAGEGLKNMKSELVENAAIKNILSKTGWRVSVDVISKKSPVVLRRNAFGEPRWKTNAGLPVSYRWQDTETKE

SEQ ID NO: 151 - protein, 1371 aa, Gordonibacter pamelaeae
MNLRNVESYQVGLDIGTGSVGWAVLDDNGDLCRFKGKPTWGSRVFPTAETAAEARVHRGQRRRYDRRRQRIDLLQRFFADEVAKVDPEFFIRLNQARLHPENRDPAHADYRWPLFNGSNFTEKDYYRQFPTIYHLRAHLLKSDEPADIRLVYLALHNIVKHRGNFLHQDNPSLSARNANVGDAVEALCLALDEWCGAHDVECACDEAALAEALGDASLRPGEKRERAEAALGVEKAHKKLAKAVSSAVVGYAAEFGHVFFAESEGSKFALSNDEKVEAYVCPDEGRDLFDAMRAVHSSYVLMGILSEAQGELLSVCKVGEYERYKRDLETLKSLVRAYGPERYDEFFCGPFYEGTRDYDPGKAQGYTKYNLGASKLSHEDFLKEVQKLLKDIGAQADERYADIERAIEAGAFLRRLKTSDNGTIPYQLHLEEMDAIIERQAAFYPFLAQEKDKLKSLVSFRIPYYVGPLTQKNAARDGKGEARFAWSSRKPGMEDARVYPWNWEDVIDKDQSAEDFIRRMTGTCTYLKGEPVLARCSLDYELFCVLNELAGARWTQDGDKSYRFDAADRLGIVEDLFKKRKRVTYEAAEKWLARTHGPESGKSAGGAYHVSGGQGEDAFESQLSSHYDFCKILGVDELSDADEAMAEDIILWNTVFEDRSILKRKIKLAYGDRLGDAQVRKLCQKRYTGWGRLSGELLRGLRSATDNGPKTIMDILLEGDPNHARRMGAAMNLMEILHDDLLEFQAKIDEHNRERALAVGGMSVDEVTGSPALRRGINQALRVVDEIAGIAGKPPAHIYVEVTRDEGARNKGRRTTSRYRALEAALSSIKAQCADVYAELKERDPRALDDERLTLYFMQCGKCMYSGDALDINKLQTYQVDHILPQSYVKDDSFENKVLVRPDTNQRKGDTLLLDERLIARMRGFWRTLRDAELIGEKKFNNLTRTSVSDEQMKKFVSRQLVETGQMVKQVQQLLQARYPESEVQPVKAGVSHQLRVGCALAKSREINDFHHAHDAYLACQVGRFVQYRHSAVYSEPVKMAAVVKQFIKKQAEDYRRTRELPGSDGFIVSSFMTPGFDVKTGEVFRDAWDAGAEIDRIRRCFDYKDCFISRMPEETHGAFWDATIYSPRAAGKTLSLPLKRGLDPRKYGSYSREQFAYFFVYEAVKPKKKQRVLEFAPVPVRVASALANDPDALEDYARELAEAEGLVFERIRRRKVYKYQQIIVGDSRLYVTGREEVRNARQLAFSQDETKLICRIEQGEECEEGELLDLFRSMQRKYLACAPRLARLMKVAEMEEGFIAATASGKREVLLSLTSIAAAHRNSIDLKPIGRKGSSGQMKITFSKELSTNGILFVDSSVTGMFERRCRLGL

SEQ ID NO: 152 - protein, 1388 aa, Zunongwangia profunda
MKRILGLDLGTNSIGWALVNEAENEKEISKIIKLGVRVNPLTIDEKTNFEKGRPLSTNADRTLKRGARRNLQRYKLRRENLIEILIDNHIITKETPLTEIGKGTTYQTLSLRAKAVRERIDLEDFAKVLLAINKKRGYKSSRKASNDEEGQAIDGMAIAKELYERGITPGQYVLELLENDRKYIPDFYRSDLKQEFNKIWNNQKTFYPEILTDELFKELDGKNKSQTWAICQKPFNIKGIKRITKGREKTIENYHWRVKGLSGKLNLEKLAIILQEINNDINQSSGYLGGISDKSKKLYLNKETVGEFLYKQIAKNPHTSLKNQVFYRHDYLDEFEQIWKTQSNFNANLTDELKQEIRDVIIFYQRKIKSQKSLISFCQFESWEQEYFDKETGKTKTRTVGRRVIPKSSPLFQEFKIWQNLNHLVFTNSETDEKIEIKEVEQEIRKELFEELNLRGDLNPNDLLKILRSQFKIGKLSNWKCNFEKIEGNRTNAALFNIYQKISDFEGYGIDWNKSNAKKIRKELKATFPEIGIDASILEFDAYKKQLTNQSSYELWHLLYSAEEDFKISEQDKLIYGNSSVSLKKKLHLKFGFNPEYAKMLANLSLMSDYGNLSAKAIKKILPYLEDGHLYSEACRLAGYNHSKSLTAEELEKFEPKAKLDLLKKNSLRNPVVEKILNQMVNVVNQVIDTYGKPDGVRIELARELKKSAKERAEMTKGIADGTRRNEEIKKIITQKFGIPNPTKSDLVRYRLWQELESRGYKDIFTDKYISPDKIFSSEIDIEHIIPKALLFDDSFSNKTLSFRNVNLKKANRTALDFITQDYQSNVEAYKERVETWNKDNHISKGKRNKLLMSLKDIPDGFIERDLRNSQYIARKAKRMLYEVFPNEVLATSGSITDKLRSDWDLINVMKELNLPKYKALGLTEYEERLDKGTEELFKHEVIKDWTKRNDHRHHAMDALAVAFTTHNHIQYINNLNARKDITQDNHPIIKNIENLITEVNSKGKRVFKAPMSSFRESAKEQIEAILVSFKNKNKVVTKNINQTKKEGGFNYQNAKTPRGQLHKETIYGKSKQPLEKPVKINNRFCKKQVGLIINFKEQEAVLHHLKKYDNNEKIAFSNKTLKSDPIQVNGSPLREVKIFEEIFTIRKDINPDNFKTQKHLDKIIDKGIKEVMKKRLEEYNGDFKTAFSDLDKNPIWLNQSKGITIKRATISGVTNAEPLHQAKDHLGNIILDDNGKEIPIDYVSTGNNHHVAIYQDESGNLQEEVVSFYEAVIRKNQDQPIIKKRHPKGWKFLFTMKQNEMFVFSSENFNPSEIDLLDEKNAAIISPNLFRVQKIATKNYMFRHHLETEVTNNLDFTYRHFQATEWLRNLCKVRIDHIGRIVQIGEY

SEQ ID NO: 153 - protein, 1082 aa, Methylosinus trichosporium
MRVLGLDAGIASLGWALIEIEESNRGELSQGTIIGAGTWMFDAPEEKTQAGAKLKSEQRRTFRGQRRVVRRRRQRMNEVRRILHSHGLLPSSDRDALKQPGLDPWRIRAEALDRLLGPVELAVALGHIARHRGFKSNSKGAKTNDPADDTSKMKRAVNETREKLARFGSAAKMLVEDESFVLRQTPTKNGASEIVRRFRNREGDYSRSLLRDDLAAEMRALFTAQARFQSAIATADLQTAFTKAAFFQRPLQDSEKLVGPCPFEVDEKRAPKRGYSFELFRFLSRLNHVTLRDGKQERTLTRDELALAAADFGAAAKVSFTALRKKLKLPETTVFVGVKADEESKLDVVARSGKAAEGTARLRSVIVDALGELAWGALLCSPEKLDKIAEVISFRSDIGRISEGLAQAGCNAPLVDALTAAASDGRFDPFTGAGHISSKAARNILSGLRQGMTYDKACCAADYDHTASRERGAFDVGGHGREALKRILQEERISRELVGSPTARKALIESIKQVKAIVERYGVPDRIHVELARDVGKSIEEREEITRGIEKRNRQKDKLRGLFEKEVGRPPQDGARGKEELLRFELWSEQMGRCLYTDDYISPSQLVATDDAVQVDHILPWSRFADDSYANKTLCMAKANQDKKGRTPYEWFKAEKTDTEWDAFIVRVEALADMKGFKKRNYKLRNAEEAAAKFRNRNLNDTRWACRLLAEALKQLYPKGEKDKDGKERRRVFSRPGALTDRLRRAWGLQWMKKSTKGDRIPDDRHHALDAIVIAATTESLLQRATREVQEIEDKGLHYDLVKNVTPPWPGFREQAVEAVEKVFVARAERRRARGKAHDATIRHIAVREGEQRVYERRKVAELKLADLDRVKDAERNARLIEKLRNWIEAGSPKDDPPLSPKGDPIFKVRLVTKSKVNIALDTGNPKRPGTVDRGEMARVDVFRKASKKGKYEYYLVPIYPHDIATMKTPPIRAVQAYKPEDEWPEMDSSYEFCWSLVPMTYLQVISSKGEIFEGYYRGMNRSVGAIQLSAHSNSSDVVQGIGARTLTEFKKFNVDRFGRKHEVERELRTWRGETWRGKAYI

SEQ ID NO: 154 - protein, 1186 aa, Gardnerella vaginalis
MEGNISYAIGIDVGLNSVGLAAIRLDNNGEPIRILKAMSVIHDAGIDPNGAKESDTRKAISGVARRVRRLYRQRRRRLQKLDFLLHSLGFPVVENKDLDFSDSFTPWIFRAKLADEYIADEKQRKQMLSVAIRHIARHRGWRNPYQSIKSMTQETEYSEFYNELLKNIEKFAPGVSCEGSTPAQLVRDYLLSQQGKASRRLRITTDDRRKNHPNSLDPVLPRKLMQSDNMLEILNIFNVQHIDNKYVREQIINAVFYAKSPRGSAENRVGKDAITGKGKRALKASLAFQKYRIISTISNLRIRENSKERCLTIEEKQSVYKLLTTSTDEYSKEKSAEAPLYTWIDVADCLGIERYKLRGVGSQIEDGESVGNRPPMLNSELAILYANAKSLKQSLITWWLAANRTQEDKEAFIEILSNTVDIEAIHDNPEYQDKYGSVIAFIDSMDETEIAALENISLPNGRAAYSLETLDKLNKQMLETDDDLFEARKKLFNLPNNWRPSEAPIAEPTGNPSVDRVLKIVHRFLISAKNRWGNPERINIEHVRSGFQSKKMANSYKKLLDKRTEGKENLKAMMRNSLHLGTSDSISDADIRRYEAVQRQNGQCLYCGSEITYHTCELDHIVPRKGPGSTNTRENLVATCSSCNAQKCNTPFATWCEESTYCKNHDISVDSAINRVRAFIFPPNSYDKRGASQFKKEVIARLKQKVGDEAFDNRSIESVAWMANELHRRIDWYYNSQNYQTNNGISDITNKAQTNVGVYAGSLTAIARRMSGIDGKLEFFDGRRKTRFDRRHHAVDASVIAMMTPGIAQILAIKCNLRETQLLQGNKVVPGGIDWKEYPTANDQGYQQYANWSVRMNALLELLNEEMRADRIAVVNSIRLRYSNSSVHKDDVHALLKLHVGDEIDSETIRRASTPALYCALTRNPDYDVNNGLPENTDRTILLHDKKLNADDSITFFKSKAAQLFVREGSVEIGNSIHHLRIYEYFEKLKSGKVKKSYGMIRVFQDDLHRYIHEDLFSCDLPEQSISMRYADTKVAHAVQTGNANYLGYLVPGDEIIVDFSHVKLSGYIGEFVEFLNKIGANCAAYKHWVVAGTDDKTTLILKPSMISSEGIDKLYSNCERNNFDYASYEKSIDKILVDKGWRVSVNVLDQYKAATIRRNALGEPRWASRSHLPISWSWDTGENRE

SEQ ID NO: 155 - protein, 1434 aa, Bacteroidetes oral
MKNILGLDLGTNSIGWAYVKQAQNDSEKSEIAELGVRVNPLTVDEKTNFEKGKPISTNADRTLKRGARRNLQRYKLRRQELIELLKDYQVISDKTILAEDGKETTFETLRLRVKSAKEQVSLEELARILLMINKKRGYKSSRKAKNEDEGQLIDGMEIARRLYDENLTTGQLSLQLLKEGKKSLPDYYRSDLQHELDKVWNFQKQFHPDILTDEFYTSIQGKGQKATRESFSSKYGIDTAENKGSREEKKLQAYQWRADATHKELTKEELAFVITEINNNINNSSGYLGAISDRSKELIFANETVGEYLWKQIQNDPHTSLKNQVFYRQDYFDEFERIWETQSGFYPQILTESLKNELRDILIFYQRKLKSQKALVSICEFESKEIPLKDKQGNPISKNGIPVTKLVGPKVAPKSSPLFQEFKIWQNLNNVLVRPKGSRKRKVTTNQQSTLLEGQEPVFELNLEQKELLFEELNLKGNLKTDYCLELIGYSAKEWEMNYPTLEGNKTNKALYEAYLKIIDSEGYDAKKLLKVKTDKDDINLDDIKVSASEIKTMISDIFNELGINTKILDFDAELERKQFEAQASYRLWHLLYSYEGDDSKSGNELLYRLLEDKFGFKREHSKTLANVSLLSDYGNLSTKAIRTIYPYIKENKFSTACELAGYRHSKLSISKEENENRTLKDTLDVLKKNSLRQPVVEKILNQMINLINELIEKHSEKDEKGNIVKYFKFDEIHIELARELKKNAEERRELDSKVREGKDRNEKIITILKSEFGLPYPTKNDITRYRLYEELKDNGYKDLYTNTYIPREKLFSKEIDIEHIIPKSRLFNDSFSNKTICYRQDNLNKGERTAYDYIEGLGKTQLDEYLNRVENLYTNKFITKAKYRNLLKKESEIGDGFIERDLRETQYIAKKAKEMLLQITRHVVSTTGSITDRLRDDWELVNVMRELNLPKYKVLGLTEIQERKNGQTVEVITDWTKRNDHRHHAMDALTVAFTKHSHIQYLNFLNARKDEKHKEYSNIMGIQQLETEKTTDKDGKDRRVFKTPIPNFRQVAKEHLESILISHKTKNKVVTRATNKIAGSKKQQETLSPRGQLHKETVYGKYRRYVQKEEKIGSKFDLQTIERVANPLYKRLLTKRLEENGGDPKKAFTGKNALAKSPIYLDETQTQQLPEKVKLVWLETDFSIRKDITPDNFKDEKSIDKVLDEGIKRILKDRLKSFDGDAKRAFTDLEQNPIWLNKEKGIAIKRVTISGVSNAEPLHTKKDHLGNEIFDDTGKPIPVDYVSTGNNHHIAIYRDENGNLQEKAVSFFEAVTRANQGLPTVDKTYNQHLGWQFLFTMKQNEMFVFPNKETGFDPQEIDLLDPKNKKLISPNLFRVQKISTKNYFFRHHLETSVETHNALNGVTYKSQLGLNGITDIIKVRINHLGDIVHIGEY

SEQ ID NO: 156 - protein, 1341 aa, Peptoniphilus sp.
MWGSRLFEEASTAQDRREHRSNRRRLERRKYRLDLLEELFVEEINKIDPEFFIRLRESKFHFEDRSLKNTFILFNDKMEGGYNDKVFFSKYPTIYHLRSALINGNKEDVRAVFLAIHNILKNRGHFLLAGNDINISLSLNDTLTDLFEYLKIHLGIEVEFENKLKDIEKIALDKNLSKSDKQKKIVQLLETDYKKQLADVFKLSLGLTANMENIFGKENEQGLEFINAENKIKKIQFDSSYEENIAEFDQFYGEYFEIIDICKKIYDAISLSQILVDGKGLSESKVLSYEKHKEDLKLLKKVLKNIDKAYDNKGEDRLVYKVLKEDKDKGTNYVNYSKLSNNGTATTKEEFYKFLSKNLDLKKFGKLNKEDIETLDYINSEILLGRFLPLQKEKINGVIPYQLQMKELTQILNNASKYLPFLNKIEDGMTVKDKIISLIKFRIPYYVGPLNEYNRIENGNGFAWIEKKKNEKIFPWNFNDVVDIEKSAEKFINNLTNKCTYIKEETVLPKNSIIYSKFMVLNELNNLQYGNKKLDIELKMKMYTDLFLEKKDNRKVTEKRILEYFRINGINDGKEKLTGLNNEIHADMKSYRDMCEIMGENFNINVAENIINWITVFHGEKKILINKIKNVYGKMFNDEQISKLSKLNYSDWGRLSKKLLTDIKCYIDADGINFPVSILEAMEVSNKNLMELLSNKYEFISCIDDINNKYFGDRDISASELIDELYVSPAVKRGIWQSVRILEEIVSIIGHNPKKIFIEMTRHNEEKVQKSSRRHNLEELYKAIRKDPEYVELIKEFDSTTDTDSFKIKKLYLYFMQLGKCAYSKEKIDFDKLFTDSYDIDHIYPRSKTKDDSIHNNLVLVKAKYNREKTDVYPIDINIQKNMNSFWNFLYTKKFITEEKYKRLIRTSDLTDEELAKFISRQLVETSQSTKATAEVLKQIYGDSDICYVKAENVSDFRYGSSRQKDKNDIQKLFVKCREVNHFHHAKDAYLNIVVGNVYDVKFTKNPVNFIKKNKMGNKSNYSLNHMFCFDVERNGYKAWDSSETIKTVGRMMKSNDVRITKHVHPTRGELYDATIYKAKIAKTGSYMPLKSSKNTPLSDVTKYGGYTKIKIAYYSVYKYKFSDKNLIKTEIRLIPIPIYLSKNDDDIKEYVKNYLNDRVNSKLIDFTKIYDKLYVNSLIKINGYLYYLGGKTNDRVWIDNAVSIVLDDKIEYLIKRISNDIKYGYEINVSDDELMDIYESLAEKANKKIFYNRLSDFEKIFSNMDVKKKFVKLEKNDKCRVLLQLLNVLTDSQTTYKLEMVGLKHSRSNIGMKISNLEEFKVINSSITGLYSNEIDILNI

SEQ ID NO: 157 - protein, 1391 aa, Lactobacillus gasseri
MTKIKNEYIVGLDVGTNSCGWVAMDFQNTILRMHGKTAIGSHLFDAGNSAADRRAFRTTRRRIKRRKWRLKLLEEIFDPYMTEVDPYFFARLKESGLSPLDKRKNVSSIVFPTALEDKKFYCNYPTIYHLRYDLMSEDKKFDLREIYLAIHHIVKYRGNFLYNTPVKDFEASKIDVKDSLEKLNELYERLDSEFTVELDSSNALEIEKIIRDKKVFKINKVKSIHQLLSLKTENKERTKLIKDVSKQIINAILGYKTKFETILLKNISKDEADDWEFKLTDVDADNKFENLIGDLNENEQEILLEIRNLANAITLSNIVEEGKTLSESMIDKYNKHSDDLELLKQVISDHPDRDKAKKLALAYDLYVNNRHGKLLQAKDVLGSKKTLSKEDFYKEVKKNLDDSKASQEILDTIALDSFMPKQRTNENGVIPYQLHQLELDRIIKNQGKYYPFLKEVNPVSSHLKEAPYKLDELIRFRVPYYVGPLISPNESTKNKQTKKNQNFAWMIRKEQGQITPWNFDQKVDRMASANKFIKRMTTKDTYLLGEDVLPANSLLYQKFTVLNELNNIKINGKRISVPLKEELYNNLFKKNSTVTTNKLKSYLKENYNLINVEIKGLADEKKFNSGLTTYNKLRNLKIFDQQLDDLNYDKDFERIIEWSTIFEDKAIYKDKLKTIKWLSDRQIDKLSKIRMQGWGQLSKKLLSQLTDNNGQTIIEQLWDSQNNFMQIVNQSDFKDAIAVANQNLLVNTSVEDILNEAYTSPANKKAIRQVVKVVDDIVKAASGKVPKQIAIEFTRDADDKAKISQTRANKLRKVYKELSNELASETIRNELERVAKDQKLLKDKYYLYFMQLGRDAYTGEPINIDDLGQYDIDHILPQSFIKDDSLENRVLVKKAVNNGKSDNVPVKLYGNRMAADLGMTIRHMWEKWKDQGLITKTKYNNLIIDPDKINKYESSGFIHRQLVETSQIIKLVSTILQSKYPDTEIIVVKARYNHYLRKHLNLYKSREVNDYHHAIDAYLSAICGNLLYQVYPYLRPFFVYGQYKKFSSDPKKEKIIYDKTRKYNFISQIFENKSNDIISLETKKKVFDKKDIIEKLKHAYNYKYMLVSRETETHDQEMFKMTVYPRLSRDTKKSRNLISKKKDMPTEIYGGYTNNSDAYMVIARINKKKGTEYRVFGVPMRELVNLRKAEKNGRYNAYLKQVLEPEIMYSKNGKKNKTISSFEIVKAKVPYKQVILDGDKKFMLASSTYVQNAKQLTLSQNSMQAITDNCENDTEEEKALEEKALIEAYDEILTNIDKYLPLFDINKFREKLHAGREKFINLSLDVKKDTILQVLNGLHDNAVMPKIKSLGLSTPLGFMQFSSGVPLSENAKLIYQSPTGLFEKRVKISDL

SEQ ID NO: 158 - protein, 1426 aa, Sphingobacterium spiritivorum
MKHILGLDLGTNSIGWALIKQDFENKQGEILGMGSRIIPMSQDILGDFGKGNSVSQTAERTKYRSVRRLRERFLLRRERLHRILNVLGFLPEHYASQIDFTKRFGKFKEETEPKLVYSNEGFIFKKSFEEMLSDFKTHQPQLLEDNKKIPYDWTIYYLRKKALSRKIEKEELAWILLNFNQKRGYYQLRGEEEEENPNKLIEFYSLKIVDVLADEPQKGKSDIWYSLILENGWIYRRSSKTPLFDWKEKTRDFIVTIDLNDDGSVKTDKEGNEKRSFRAPGENDWTLVKKKTEQEIDSSRKTVGTYIYETLLKNPKQKIKGKLVRTIERKFYKTELKQILEKQKEFHPELRQDDLYSDCVRELYKNNEAHQLTLSKKDFVHLFMEDIIFYQRPLGSQKSSISNCTLEFRKYKDENGTEHTQYLKAIPKSNPYYQEFRIWQWMYNLNIYKKEDDTNVTKDFLNTKADFESLFEFLNNRKEVDQKALLKHFKLNDKTHRWNYVEDKKYPCNETKTMILSRLDKVENISDDFLTREMEQKIWHIIYSVNDKVEYEKALKSFAGKNNLEDNSFFEAFKKFPPFKSEYGAFSEKAIKKLLPLMRMGKFWNYNNISEQSKSRIQKIITGEYDENIKDKVREKAIHLTTETDFQGLQLWLVQYIVYGRHSEAAMLGKWNSADDLEEFLKEFKQHSLRNPIVEQVITETLRVVKDIWQKYGNGAKDFFREIHIELGREMKLPAEERERLTRQISENENTNFRIKALLAEMMDDNSVENVRPFSPMQQEILKIYEEGVLNSDIEIEDDILKISKTAQPSSSDLKRYKLWLEQKYKSPYTGQIIPLNKLFTPEYEIEHIIPQSRYFDDSFTNKIICESAVNKLKDNYIGLEFIKKLGGSIVECGNGKSVAILKHDAYEDFIKKHYANNRSKRNKLLLEDIPEKMIERQMNDTRYISKYISGVLSNIVRVEDGTDEGVNSKNIVPGNGKITTQLKQDWGLNDVWNDLILPRFERMNHLTNSTDFTAWNENHQKFLPTVPVEFSKGFSKKRIDHRHHALDALVIACATKDHVNLLNNQSAKSDTKRYDLKKKLMKFEKVAYNHPQTGERIEREAPKQFLKPWETFTIDAKNHLETIIVSFKQNLRVINKATNYYEKYVEKEGTKVKERVEQKGTNWAIRKPMHKETVSGKIDLPRIKVPKGKILTATRKSLDTSFNLKTIGSITDTGIQKILKNYLQYKDNNPELAFSPEGIEDMNKNIEKFNNGKAHQSISKVRVFELGSKFPLGQSGNKKEKYVEAAKGTNLFFAIYQDKNGKRSYETIPLNEVIERQKQGLSVVDLKGVDDFYLSPNDLVYVPSEDELENISMIDFNKMSSERIYKVVSFTGNQIFFVRQDIATSVVNKAEFSTLNKMERAIDGTMIKETCVKLQIDRLGNISKI

SEQ ID NO: 159 - protein, 1361 aa, Lactobacillus casei; identical to SEQ ID NO: 75

SEQ ID NO: 160 - protein, 1436 aa, Bacteroides fragilis
MKRILGLDLGTNSIGWALVNEAENKDERSSIVKLGVRVNPLTVDELTNFEKGKSITTNADRTLKRGMRRNLQRYKLRRETLTEVLKEHKLITEDTILSENGNRTTFETYRLRAKAVTEEISLEEFARVLLMINKKRGYKSSRKAKGVEEGTLIDGMDIARELYNNNLTPGELCLQLLDAGKKFLPDFYRSDLQNELDRIWEKQKEYYPEILTDVLKEELRGKKRDAVWAICAKYFVWKENYTEWNKEKGKTEQQEREHKLEGIYSKRKRDEAKRENLQWRVNGLKEKLSLEQLVIVFQEMNTQINNSSGYLGAISDRSKELYFNKQTVGQYQMEMLDKNPNASLRNMVFYRQDYLDEFNMLWEKQAVYHKELTEELKKEIRDIIIFYQRRLKSQKGLIGFCEFESRQIEVDIDGKKKIKTVGNRVISRSSPLFQEFKIWQILNNIEVTVVGKKRKRRKLKENYSALFEELNDAEQLELNGSRRLCQEEKELLAQELFIRDKMTKSEVLKLLFDNPQELDLNFKTIDGNKTGYALFQAYSKMIEMSGHEPVDFKKPVEKVVEYIKAVFDLLNWNTDILGFNSNEELDNQSYYKLWHLLYSFEGDNTPTGNGRLIQKMTELYGFEKEYATILANVSFQDDYGSLSAKAIHKILPHLKEGNRYDVACVYAGYRHSESSLTREEIANKVLKDRLMLLPKNSLHNPVVEKILNQMVNVINVIIDIYGKPDEIRVELARELKKNAKEREELTKSIAQTTKAHEEYKTLLQTEFGLTNVSRTDILRYKLYKELESCGYKTLYSNTYISREKLFSKEFDIEHIIPQARLFDDSFSNKTLEARSVNIEKGNKTAYDFVKEKFGESGADNSLEHYLNNIEDLFKSGKISKTKYNKLKMAEQDIPDGFIERDLRNTQYIAKKALSMLNEISHRVVATSGSVTDKLREDWQLIDVMKELNWEKYKALGLVEYFEDRDGRQIGRIKDWTKRNDHRHHAMDALTVAFTKDVFIQYFNNKNASLDPNANEHAIKNKYFQNGRAIAPMPLREFRAEAKKHLENTLISIKAKNKVITGNINKTRKKGGVNKNMQQTPRGQLHLETIYGSGKQYLTKEEKVNASFDMRKIGTVSKLAYRDALLKRLYENDNDPKKAFAGKNSLDKQPIWLDKEQMRKVPEKVKIVTLEAIYTIRKEISPDLKVDKVIDVGVRKILIDRLNEYGNDAKKAFSNLDENPIWLNKEKGISIKRVTISGISNAQSLHVKKDKDGKPILDENGRNIPVDFVNTGNNHHVAVYYRPVIDKRGQLVVDEAGNPKYELEEVVVSFFEAVTRANLGQPIIDKDYKTTEGWQFLFSMKQNEYFVFPNEKTGFNPKEIDLLDVENYGLISPNLFRVQKFSLKNYVFRHHLETTIKDTSSILRGITWIDFRSSKGLDTIVKVRVNHIGQIVSVGEY

SEQ ID NO: 161 - protein, 1517 aa, Bacteroides sp.
MKKIVGLDLGTNSIGWALINAYINKEHLYGIEACGSRIIPMDAAILGNFDKGNSISQTADRTSYRGIRRLRERHLLRRERLHRILDLLGFLPKHYSDSLNRYGKFLNDIECKLPWVKDETGSYKFIFQESFKEMLANFTEHHPILIANNKKVPYDWTIYYLRKKALTQKISKEELAWILLNFNQKRGYYQLRGEEEETPNKLVEYYSLKVEKVEDSGERKGKDTWYNVHLENGMIYRRTSNIPLDWEGKTKEFIVTTDLEADGSPKKDKEGNIKRSFRAPKDDDWTLIKKKTEADIDKIKMTVGAYIYDTLLQKPDQKIRGKLVRTIERKYYKNELYQILKTQSEFHEELRDKQLYIACLNELYPNNEPRRNSISTRDFCHLFIEDIIFYQRPLKSKKSLIDNCPYEENRYIDKESGEIKHASIKCIAKSHPLYQEFRLWQFIVNLRIYRKETDVDVTQELLPTEADYVTLFEWLNEKKEIDQKAFFKYPPFGFKKTTSNYRWNYVEDKPYPCNETHAQIIARLGKAHIPKAFLSKEKEETLWHILYSIEDKQEIEKALHSFANKNNLSEEFIEQFKNFPPFKKEYGSYSAKAIKKLLPLMRMGKYWSIENIDNGTRIRINKIIDGEYDENIRERVRQKAINLTDITHFRALPLWLACYLVYDRHSEVKDIVKWKTPKDIDLYLKSFKQHSLRNPIVEQVITETLRTVRDIWQQVGHIDEIHIELGREMKNPADKRARMSQQMIKNENTNLRIKALLTEFLNPEFGIENVRPYSPSQQDLLRIYEEGVLNSILELPEDIGIILGKFNQTDTLKRPTRSEILRYKLWLEQKYRSPYTGEMIPLSKLFTPAYEIEHIIPQSRYFDDSLSNKVICESEINKLKDRSLGYEFIKNHHGEKVELAFDKPVEVLSVEAYEKLVHESYSHNRSKMKKLLMEDIPDQFIERQLNDSRYISKVVKSLLSNIVREENEQEAISKNVIPCTGGITDRLKKDWGINDVWNKIVLPRFIRLNELTESTRFTSINTNNTMIPSMPLELQKGFNKKRIDHRHHAMDAIIIACANRNIVNYLNNVSASKNTKITRRDLQTLLCHKDKTDNNGNYKWVIDKPWETFTQDTLTALQKITVSFKQNLRVINKTTNHYQHYENGKKIVSNQSKGDSWAIRKSMHKETVHGEVNLRMIKTVSFNEALKKPQAIVEMDLKKKILAMLELGYDTKRIKNYFEENKDTWQDINPSKIKVYYFTKETKDRYFAVRKPIDTSFDKKKIKESITDTGIQQIMLRHLETKDNDPTLAFSPDGIDEMNRNILILNKGKKHQPIYKVRVYEKAEKFTVGQKGNKRTKFVEAAKGTNLFFAIYETEEIDKDTKKVIRKRSYSTIPLNVVIERQKQGLSSAPEDENGNLPKYILSPNDLVYVPTQEEINKGEVVMPIDRDRIYKMVDSSGITANFIPASTANLIFALPKATAEIYCNGENCIQNEYGIGSPQSKNQKAITGEMVKEICFPIKVDRLGNIIQVGSCILTN

SEQ ID NO: 162 - protein, 1399 aa, Olsenella uli
MNLRNTTDEYNIGLDMGTNSVGWAVTDKAGAIAHFKGKPTLGSRLFDAAQTAAGARIHRSQRRRYVRRRWRLDLLQSLFQDEVSKVDSEFFCRLRQSRLYVGDREKGHADYTWPIFNDSDFNEVDYYKRFPTIYHLRKWLMETDEKADIRLIYLATHNIVKHRGNFLRENNKSLSSRDANPAQAVKSLRLALNDWCSERDYECAWKGEEDDGAIDEAILNVLADGEKGRSDQAKEIAKLTGVDCGDAKQSKQCNEAIAKAIVGLKVEMKNIFGEFPAEKTSYIYLSSDEDVEAVRESCPDDSGELFQALCKLYSAYILQELLSYADPSGQTISANMVAKYKQYGRDLRLLKELTRTYAPQKYDLFFRGETYAGSSDYVVDEARGYTRYNLGTTKANYDDFQKSVKELFKGTDALQDERYQEMMVAFGEQKFLRRLKTSDNGSIYYQLHLEELHTILENQGKHYPFLLSEEDKIESLVSFRIPYYVGPLTRKNAAIGHDGKERFAWSSRKDGMEHAVITPWNWEEIIDRDKSAEDFIMRMTGDCTYLQGEPVLPKCSLLYEEFCALNEFNGAHWTVDGDDERRFDAAQRERIMCDLFRRTRSVTYNKVSDWLERKYNFTGARVRGGQGEHGFESKLGSYIFFCKDVFKTDGLDEADYTMIEQIILWSTLFEDRDILKRKIEEAYGGDRLTSEQIKVICKKRFTGWGRLSKRLLTDIKVNTDTGRKSIMDVLREGNPNNGQRSRTMVFMEVLRDEDLGFQKAIDGLNRDYFREHNNGLMDVNDLPGSPAIRRSINQAVRIVDEIASIARKEPTNIFIEVTREEDDPRKKGKRTKRRYDAIKSALEKFKKDDPSLWKELCEKAPGDMDERLSLYFMQRGKCMYSGRPIKIEELHTGKYEVDHIIPRSYIKDDSFENKVLVYREENQHKTDALLIDSSIRQKMGGYWRMLHDAKLVGDKKFRNLFRNHIDDKAMKGFVARQIVETSQMVKLVQTLFEARYPNTRIVPVKAGISHDLREAAGLVKCREANDFHHAHDAFLACRIGLFIQKRHPSVYDNPIGLARIMRDYARMQAREYKKSHCLAHTQGFIVNSFLSSGFDEETGEIFKDDWDAKAEVEGIRRVLNCRQCFISRMPVEGDTRYGGRYWGETIYSPKGKHKHEIPLKQGLDPNLYGGYSDLLYSYFLIYEASDVSSGERVLRFIGIPTSIAARMANQKRLEEYVSRLALQENLEHVRMVRKIMKKQLIEVDNCRLLVTAADAVTNATELAFSLDEMKIISTCAKCINGADPSAIDKIGNAQDSFFDNLKRRGSDRCALLFSQLKLDKLSQNFYMISSDDKSKILISILDRIRAKSNSVDLSLVGGAKHAAQMKFDFNAKLNNPASSFVLIDQSVTGMFERRTRIGL

SEQ ID NO: 163 - protein, 1398 aa, Veillonella atypica
METQTSNQLITSHLKDYPKQDYFVGLDIGTNSVGWAVTNTSYELLKFHSHKMWGSRLFEEGESAVTRRGFRSMRRRLERRKLRLKLLEELFADAMAQVDSTFFIRLHESKYHYEDKTTGHSSKHILFIDEDYTDQDYFTEYPTIYHLRKDLMENGTDDIRKLFLAVHHILKYRGNFLYEGATFNSNAFTFEDVLKQALVNITFNCFDTNSAISSISNILMESGKTKSDKAKAIERLVDTYTVFDEVNTPDKPQKEQVKEDKKTLKAFANLVLGLSANLIDLFGSVEDIDDDLKKLQIVGDTYDEKRDELAKVWGDEIHIIDDCKSVYDAIILMSIKEPGLTISQSKVKAFDKHKEDLVILKSLLKLDRNVYNEMFKSDKKGLHNYVHYIKQGRTEETSCSREDFYKYTKKIVEGLADSKDKEYILNEIELQTLLPLQRIKDNGVIPYQLHLEELKVILDKCGPKFPFLHTVSDGFSVTEKLIKMLEFRIPYYVGPLNTHHNIDNGGFSWAVRKQAGRVTPWNFEEKIDREKSAAAFIKNLTNKCTYLFGEDVLPKSSLLYSEFMLLNELNNVRIDGKALAQGVKQHLIDSIFKQDHKKMTKNRIELFLKDNNYITKKHKPEITGLDGEIKNDLTSYRDMVRILGNNFDVSMAEDIITDITIFGESKKMLRQTLRNKFGSQLNDETIKKLSKLRYRDWGRLSKKLLKGIDGCDKAGNGAPKTIIELMRNDSYNLMEILGDKFSFMECIEEENAKLAQGQVVNPHDIIDELALSPAVKRAVWQALRIVDEVAHIKKALPSRIFVEVARTNKSEKKKKDSRQKRLSDLYSAIKKDDVLQSGLQDKEFGALKSGLANYDDAALRSKKLYLYYTQMGRCAYTGNIIDLNQLNTDNYDIDHIYPRSLTKDDSFDNLVLCERTANAKKSDIYPIDNRIQTKQKPFWAFLKHQGLISERKYERLTRIAPLTADDLSGFIARQLVETNQSVKATTTLLRRLYPDIDVVFVKAENVSDFRHNNNFIKVRSLNHHHHAKDAYLNIVVGNVYHEKFTRNFRLFFKKNGANRTYNLAKMFNYDVICTNAQDGKAWDVKTSMNTVKKMMASNDVRVTRRLLEQSGALADATIYKASVAAKAKDGAYIGMKTKYSVFADVTKYGGMTKIKNAYSIIVQYTGKKGEEIKEIVPLPIYLINRNATDIELIDYVKSVIPKAKDISIKYRKLCINQLVKVNGFYYYLGGKTNDKIYIDNAIELVVPHDIATYIKLLDKYDLLRKENKTLKASSITTSIYNINTSTVVSLSNKVGIDVFDYFMSKLRTPLYMKMKGNKVDELSSTGRSKFIKMTLEEQSIYLLEVLNLLTNSKTTFDVKPLGITGSRSTIGVKIHNLDEFKIINESITGLYSNEVTIV

SEQ ID NO: 164 - protein, 795 aa, Prevotella disiens
MEKQRILGLDPGTNSLGWAVLDFDNSKQEYNLVRKGEVIFEEGVGKSKRGEFSKAAYRTFYKSTRKHYFRRRLRKIEVLKVLVKYDFCPYLSDDLLKQWHEKKIYPAVKEFMDWQRTSDAEGKNPYYDRHCCLNEKLDLSLKSDRYVLGRALYHLTQRRGFKSNRLIQNNDENEEGKVKKGISELSTEMQEANCNYLGDYFYKLYTEKGNTVQIRKRYTDREKHYKNEFNAICEKQELNETIVKELDKAIFFQRKLKPQRHGVGKCTFEPNNRRCAISHPDFERFRMLCFINNIKIKTPFEENLRPLNNEEKALIEPLFYRKSIKNFDFEEIAKKLAGKNNYCYIKDDSSKQYKFNYRMSQGASTCQTIAKLKSIFGEEWKNGIAETYTNRRKKEGLKKQAEMVDDIWNVLYSVSECDVLKDFAINKLQLDEKTADNFSKTKLAQGFATLSLKAIRKILPFLEQGFGYTEAVFLANIPTVVGKEYWNNEDIRNDIMEEIKTIFYHNTLKTNDSHNTILFCIKDILSNNFDLAPGAIDKLYHPSMINVYKDVIPNEDGILQLGSPKIDAVKNPMAMRSLHIIRKVVNELLREGIINSDTEVRIEYARELNDANKRHAIADWQKKQYGKHQKYRKEIKELFKAETGFEIEPNETDILKFELWEEQNHICLYTGQEIGISEFVGENPKYDIEHTIPRSLGGDSTKMNMTLCENKFNRENKQKKLPSELANHSEILERIDDWKKKIYILQKKYDSIRTHNGMDKENKDKKIVSMQVRISGSSICVYSQNTLLWLQYGYN

SEQ ID NO: 165 - protein, 1428 aa, Burkholderiales bacterium
MGKTHIIGVGLDLGGTYTGTFITSHPSDEAEHRDHSSAFTVVNSEKLSFSSKSRTAVRHRVRSYKGFDLRRRLLLLVAEYQLLQKKQTLAPEERENLRIALSGYLKRKGYARTEAETDTSVLESLDPSVFSSAPSFTNFFNDSEPLNIQWEAIANSPETTKALNKELSGQKEADFKKYIKTSFPEYSAKEILANYVEGRRAILDASKYIANLQSLGHKHRSKYLSDILQDMKRDSRITRLSEAFGSTDNLWRIIGNISNLQERAVRWYFNDAKFEQGQEQLDAVKLKNVLVRALKYLRSDDKEWSASQKQIIQSLEQSGDVLDVLAGLDPDRTIPPYEDQNNRRPPEDQTLYLNPKALSSEYGEKWKSWANKFAGAYPLLTEDLTEILKNTDRKSRIKIRSDVLPDSDYRLAYILQRAFDRSIALDECSIRRTAEDFENGVVIKNEKLEDVLSGHQLEEFLEFANRYYQETAKAKNGLWFPENALLERADLHPPMKNKILNVIVGQALGVSPAEGTDFIEEIWNSKVKGRSTVHSICNAIENERKTYGPYFSEDYKFVKTALKEGKTEKELSKKFAAVIKVLKMVSEVVPFIGKELRLSDEAQSKFDNPYSLAQLYNLIETERNGFSKVSLAAHLENAWRMTMTDGSAQCCRLPADCVRPFDGFIRKAIDRNSWEVAKRIAEEVKKSVDFTNGTVKIPVAIEANSFNFTASLTDLKYIQLKEQKLKKKLEDIQRNEENQEKRWLSKEERIRADSHGICAYTGRPLDDVGEIDHIIPRSLTLKKSESIYNSEVNLIFVSAQGNQEKKNNIYLLSNLAKNYLAAVFGASDLSQITNEIESTVLQLKAAGRLGYFDLLSEKERACARHALFLNSDSEARRAVIDVLGSRRKASVNGTQAWFVRSIFSKVRQALAAWTQETGNELIFDAISVPAADSSEMRKRFAEYRPEFRKPKVQPVASHSIDAMCIYLAACSDPFKTKRMGSQLAIYEPINFDNLFTGSCQVIQNTPRNFSDKTNIANSPIFKETIYAERFLDIIVSRGEIFIGYPSNMPFEEKPNRISIGGKDPFSILSVLGAYLDKAPSSEKEKLTIYRVVKNKAFELFSKVAGSKFTAEEDKAAKILEALHFVTVKQDVAATVSDLIKSKKELSKDSIENLAKQKGCLKKVEYSSKEFKFKGSLIIPAAVEWGKVLWNVFKENTAEELKDENALRKALEAAWPSSFGTRNLHSKAKRVFSLPVVATQSGAVRIRRKTAFGDFVYQSQDTNNLYSSFPVKNGKLDWSSPIIHPALQNRNLTAYGYRFVDHDRSISMSEFREVYNKDDLMRIELAQGTSSRRYLRVEMPGEKFLAWFGENSISLGSSFKFSVSEVFDNKIYTENAEFTKFLPKPREDNKHNGTIFFELVGPRVIFNYIVGGAASSLKEIFSEAGKERS

SEQ ID NO: 166 - protein, 1025 aa, gamma proteobacterium
MGGYMPQLMRYRLALDIGSTSIGWAMIRLSMQNEPIAIIRMGVRIFSDGRNPKDGSSLAVTRRVARQMRRRRDRLLKRKTRLLNALVQKKFFPEDADARKALVVLNPYELRKEGLYRQLSGPEFGRALFHISQRRGFLSNRKTDKKDNDSSVLKKAIVDLRQQLEVENCQTIGEWLFKQQQSGKSVRARLRGKTQKDKAYDFYIDRAMIAHEFDTLWVSQAKYDPLLFNEDARAILRDILLYQRPLKPVKPGRCTLIPDESRAPLALPLTQQARIYQELNHLRITTPALGAQALTVAQRNTIAALLEKSDVTFVKIAKALGLTSTTEFNLQDIKRDRLKGNATAIILARNQYFGRRWHDFNADLQNLIVDKLVNEGSETALIEWLKANTDVDESAAERVSGVTLPEGYGSLSVAALRRLLPALKEDVVVYSEAVKRAGFDSHSALSLIEQTGELYQELPYYGEVLQRHVGFGSGDPNDSPERRFGKIANPTVHIGLNELRKIINALIKRYGNPAEVVVELARDLKLSREKRKEIQEEQKQRQDRNEKRIKDACEILGIDPLVIDRGKRREISQKMQLWDELNPKDAANRRCPYTGDQISIEKLLSAEVEIEHILPFSKTLDDSLNNKTVAMRRANRDKGNRTPYEAFGESLNPDYDYDAILQRASLMPREKRKRFASDGYQQWLRDDKDFLSRALNDTAYLSRIAKEYLTLICPPNSVRAIPGRMTAQLRAMFGLNRLLSEGGIKNREDHRHHAIDAAVIGVTDQGLLQKFSRASARTRELQLSRLVDDMPLPWDTYREHVTRALEHLVVSHKPDHGYQGKMHEDTAWGLRDNGQVTRRVRSEDGGPRQRLLENKNVVKINSTRDFSRHGIDEQGQVNAYKGYVGGSNYCIEIWIDEKGKWNSDVVSTFQAYQIVRELGEKAAWQKLRNPLLSLSAKPLVMRLIIDDVVKMQIAGQNKIMRVVKIAQNGQIFFAEHNEANVDARDKDKNNPFKYISKTAGSLQKAGGIHMAISPIGDARPVRYGR

SEQ ID NO: 167 - protein, 1364 aa, Pediococcus acidilactici
MGDRKYNLGLDIGTSSIGFAAVDENNQPIRVKGKTAIGVRLFEEGKTAADRRGFRTTRRRLSRRRWRINLLNEIFDAHLAEVDPTFLARLKESNRSNLDPKKSFQGSLLFPERKDYQFYEEYPTIYHLRKALMEKDRKFDFREIYLAVHHIIKYRGNFLNGTPMRSFKVENIELDTLFDQLNQLYAEIVPDNELAFDLAQVADVKDVLSSTTIYKMDKKKQLVKMMLLPASNKALQSENKKIVTQFVNAILNYKFKLDVLLQVETDADWSLKLNDEGADDKLEEFTGDLDENRLEIIDLLQRLHNWFSLNEITKDGNSLSAAMVEKYENHHHHLGLLKKVIENHPDAKKAKALKETYTAYVGKTDDKTQNQDDFYKAVEKNLDDSPDAKEIKRLIQLDQFMPKQRTGQNGAIPHQLHQQELDQIIEKQSKYYPFLAEPNPNVKRRKDAPYKLDELIAFKIPYYVGPLVTPEEQAQNGENVFAWMKRKAAGPITPWNFDEKVDRMESANRFIRRMTTKDTYLFGEDVLPAESMIYQKFVVLNELNNLKINGRHLSLKDKQDVYNDLFKQQKTVSIKALQNYYVTKKKAATAPTVGGLADPKKFLSSLSTYIDFKNMFGERVNDPQFQEDLEQIVEWSTIFEDRGIFKAKLQALGWLSEKQIQQLVAKRYKGWGRLSKKLLTGLKNAEGYSILDEMWRSTGNFMQIQSRPEFAALIQQANEKQFEGNDPDNVWENIENILGDAYTSPQNKKAIRQVVKVVQDIEKAVGNPPEKIAIEFTREAAANPQRTQSRLRTLEKLYESAEEVVDAGLTAELAEFKENKHVLSDKYYLYFTQLGRDVYTGDTISLDKLNDYDVDHILPQSFIKDDSLDNRVLTIRAVNNGKSDNVPAKMFGKKMGSFWRYLLDNGMISKRKYNNLITDPDNISKYAQKGFINRQLVETSQVIKLTANILNGIYDKDTEIIEVPAKMNSQMRKMFDLVKVREVNDYHHAFDAYLTIFIGNYLYKCYPKLQPYFVYDNFKKFGNKEDIGHKRFNFLGKIEREKKVVAPETGEILWSNVAPNETIKQIKKVYDYKFMIVSREITTRRAELFNQTVYPKNYHGKLIPIKEDRPTDLYGGYSGNTDAYLAIVALEDKKKGKYFKVVGIPTRVAAKLEKLKQQDSQQYLQALHKVIAPQFTKSTKKGIKKTEFEIVLDKVHYRQLVQDGPVKMMLGSSTYKYNAKQLVLSEKALQVIADDRKFDETQKDDNLIAVYDEILSIVNQSFDLYDINGFRKKLNDNRDQFIDLPAETKYEGRKVVAHGKREMILEILKGLHANAAFGNLKPIGFSTAFGQLQVPNGIILSKNAILIHQSPSGLFERKIKLSDL

SEQ ID NO: 168 - protein, 1364 aa, Peptoniphilus duerdenii
MKNLKEYYIGLDIGTASVGWAVTDESYNIPKFNGKKMWGVRLFDDAKTAEERRTQRGSRRRLNRRKERINLLQDLFATEISKVDPNFFLRLDNSDLYREDKDEKLKSKYTLFNDKDFKDRDYHKKYPTIHHLIMDLIEDEGKKDIRLLYLACHYLLKNRGHFIFEGQKFDTKNSFDKSINDLKIHLRDEYNIDLEFNNEDLIEIITDTTLNKTNKKKELKNIVGDTKFLKAISAIMIGSSQKLVDLFEDGEFEETTVKSVDFSTTAFDDKYSEYEEALGDTISLLNILKSIYDSSILENLLKDADKSKDGNKYISKAFVKKFNKHGKDLKTLKRIIKKYLPSEYANIFRNKSINDNYVAYTKSNITSNKRTKASKFTKQEDFYKFIKKHLDTIKETKLNSSENEDLKLIDEMLTDIEFKTFIPKLKSSDNGVIPYQLKLMELKKILDNQSKYYDFLNESDEYGTVKDKVESIMEFRIPYYVGPLNPDSKYAWIKRENTKITPWNFKDIVDLDSSREEFIDRLIGRCTYLKEEKVLPKASLIYNEFMVLNELNNLKLNEFLITEEMKKAIFEELFKTKKKVTLKAVSNLLKKEFNLTGDILLSGTDGDFKQGLNSYIDFKNIIGDKVDRDDYRIKIEEIIKLIVLYEDDKTYLKKKIKSAYKNDFTDDEIKKIAALNYKDWGRLSKRFLTGIEGVDKTTGEKGSIIYFMREYNLNLMELMSGHYTFTEEVEKLNPVENRELCYEMVDELYLSPSVKRMLWQSLRVVDEIKRIIGKDPKKIFIEMARAKEAKNSRKESRKNKLLEFYKFGKKAFINEIGEERYNYLLNEINSEEESKFRWDNLYLYYTQLGRCMYSLEPIDLADLKSNNIYDQDHIYPKSKIYDDSLENRVLVKKNLNHEKGNQYPIPEKVLNKNAYGFWKILFDKGLIGQKKYTRLTRRTPFEERELAEFIERQIVETRQATKETANLLKNICQDSEIVYSKAENASRFRQEFDIIKCRTVNDLHHMHDAYLNIVVGNVYNTKFTKNPLNFIKDKDNVRSYNLENMFKYDVVRGSYTAWIADDSEGNVKAATIKKVKRELEGKNYRFTRMSYIGTGGLYDQNLMRKGKGQIPQKENTNKSNIEKYGGYNKASSAYFALIESDGKAGRERTLETIPIMVYNQEKYGNTEAVDKYLKDNLELQDPKILKDKIKINSLIKLDGFLYNIKGKTGDSLSIAGSVQLIVNKEEQKLIKKMDKFLVKKKDNKDIKVTSFDNIKEEELIKLYKTLSDKLNNGIYSNKRNNQAKNISEALDKFKEISIEEKIDVLNQIILLFQSYNNGCNLKSIGLSAKTGVVFIPKKLNYKECKLINQSITGLFENEVDLLNL

SEQ ID NO: 169 - protein, 1089 aa, Corynebacterium matruchotii
MNSANVNYRVGIDVGSYSLGMAAIAIDDDGKPTEILSAISLIHDSGVDPDSAKSAATRLATSGIARRTRRLYRRKRKRLAKLDKFISSQGWPLKEFEKYEDPFYPWRVRAELATTAITDQQELGEKLSIALRHIARHRGWRNPYSKVTALYTVTEPSDAFLAMQEECAKQLGRTIPETITVGQLVTGMNLGKTRLRGENSLLAARPRQSDNANEIHTIAKVQGLSNELVRQIIDHVFAAESPKGSAAEQVGKDPLQPTKKRALKASDAFQQYRIAALIGNLRIRGGKGNRRLTTEETRLVFDYLRSLPAKQEPTWQLVAEQLKIDRGNLVGTAIMTDDGERAGAKPPVHDTNRIMENTKIKPLATWWKSADADARAAMVKALSNAEVDDFDSQAGAQVQEFFFGISDEDQEKLDGLHLPIGRAAYSEDTLDRLTKRMIGEGMDLYEARQAEFKISNDWAPPAPEIGERVGNPAVDRVLKATARWLNAAERQWGAPKSVNIEHVRAAFMSESSARELDRDNQQRAKRNVKVVAEMQEKLGIEGRPSRADVWRFQSIQRQNGKCAYCGAEISFKNSEMDHIIPQAGEGSTNTRDNLVAVCRECNSSKSNIAFAVWAENTSRPGVSVQKAIERTHHWVTDSGLRKPEFDKFRKQVCDRLRRKATDEPIDARSLESVAWMANELRSRIAQKFKDGDTKVRVYKGALTAEARRASGISGKLEFVDGKGKSRLDRRHHAVDAAVVAFTSNYVAETLALRSNMKFDQELRRKAPQWREFTGSDHVHQVEWTKWKYRMQALAELLNNALVQDRIVVMHNLRLRLGNGAAHEDTIGKLTRLKVGDAISTTDIDRASSEALWCALTRDPDYDPKTGLPENPNRTIRIHGTHLTASDEITVFPVAAASIPIRDGFAKLGSNYHHVRLFRVPSGKKYKYCLMQVYTVDLLKFRKEDLFTVELKPQTISVRTCEALLRKALANGTAEYLGWLVSDDELLIDTSSFDTPGIVKLREEYGPVNRWRLAGLTSVTRLNLRPLYLSKEGLKPNVNPEIKKIIDNRSWIITVNKLFSSGHVKIIRRDALGRPRLHSAAHLPICWEVK

SEQ ID NO: 170 - protein, 1134 aa, Streptococcus mitis
MNGLVLGLDIGIASEGVGILEKNSGKIIHANSRLFPAATADNNVERRKNRQARRLNRRKKHRGVRFQDLFEDYGLLTDFSKVSINLNPYRLRVDGLNQQLTNEELFIALKNIVKRRGISYLDDASEDGGAVSSDYGKAVEENRKLLAEQTPGQIQLERFEKYGQVRGDFTVVENGEKLRLINVFSTSAYKKEAERILRKQQEFNNQITDEFIEDYLKILTGKRKYYHGPGNEKSRTDYGRFRTDGTTLDNIFGILIGKCTFYPEEYRASKASYTAQEFNLLNDLNNLTVPTETKKLSEEQKKVIVEYAKEAKTLGASTLLKYIAKMIDASVDQIRGYRVDVNNKPEMHTFEVYRKMQSLETISVGELSRNVLDELAHILTLNTEREGMEEAINTKLKDSFSQDQVLELVQFRKNNSSLFSKGWHNFSLKLMMELIPELYETSEEQMTILTRLGKQKSKETSKRTKYIDEKELTEEIYNPVVAKSVRQAIKIINEATKKHGIFDNIVIEMARENNEEDAKKDYIKRQKANQDEKNAAMEKAAFQYNGKKELPDNIFHGHKELATKIRLWHQQGEKCLYTGKTIPISDLIYNQYKYEIDHILPLSLSFDDSLSNKVLALATANQEKGQRTPFQALDSMDDAWSYREFKSYVKDLKSLSNKKKDYLLTEEDISKIEVKQKFIERNLVDTRYSSRVVLNALQDFYKSHQFDTTISVVRGQFTSQLRRKWGLEKSRETYHHHAVDALIIAASSQLRLWKKQNNPLITYKEGQFVDSQTGEIISLTDDEYKELVFKAPYDHFVDTLSSKTFEDSILFSYQVDSKFNRKISDATIYATRKAKLDKEKKEYTYTLGKIKDIYSLGTKTPSKTGFYKFLDLYNKDKSQFLMFQKDRKTWDEVIEKIMEQYRPFKEYDKTGKLVDFNPFEKYRQENEPIRKYSKKGNGPEIKSLKYYDILLGKHKNITPEGSRNTVALLSLNPWRTDVYYNMETKKYEFLGLKYADLPFEEGGAYGISTETYNELREKEGIGKNSEFKFTLYKNDLILIKDTETNCQQIFRFWSRTGKDNPKSFEKHKIELKPYEKARFEKGEELEVLGKVPPSSNQLQKNMQIENLSIYKVKTDVLGNKHFIKKEGDKPKLKF

SEQ ID NO: 171 - protein, 1373 aa, Streptococcus bovis
MTKKNYSIGLDIGTNSVGWAVITDDYKVPAKKMKVLGNTDKKYIKKNLLGALLFDSGETAEATRLKRTARRRYTRRKNRLRYLQEIFAEEMTKVDESFFQRLDESFLRWDDDNKKLGRYPIFGNKADVVKYHQEFPTIYHLRKHLADSSEKADLRLVYLALAHMIKFRGHFLIEGELNAENTDVQKIFADFVGVYDRTFDDSHLSEITVDAASILTEKISKSRRLENLIKYYPTEKKNTLFGNLIALALGLQPNFKMNFKLSEDAKLQFSKDSYEEDLGELLGKIGDDYADLFTSAKNLYDAILLSGILIVDDNSTKAPLSASMIKRYVEHQEDLEKLKEFIKANKSELYHDIFKDKNKNGYAGYIENGVKQDEFYKYLKNTLSKIAGSDYFLDKIEREDFLRKQRTFDNGSIPHQIHLQEMHAILRRQGDYYPFLKENQDRIEKILTFRIPYYVGPLARKDSRFSWAEYHSDEKITPWNFDKVIDKEKSAEKFITRMTLNDLYLPEEKVLPKHSHVYETYAVYNELTKIKYVNEQGKDSFFDSNMKQEIFDHVFKENRKVTKEKLLNYLNKEFPEYRIKDLIGLDKENKSFNASLGTYHDLKKILDKAFLDDKVNEEVIEDIIKTLTLFEDKDMIHERLQKYSDIFTADQLKKLERRHYTGWGRLSYKLINGIRNKENNKTILDYLIDDGSANRNFMQLINDDTLPFKQIIQKSQVVGDVDDIEAVVHDLPGSPAIKKGILQSVKIVDELVKVMGDNPDNIVIEMARENQTTNRGRSQSQQRLKKLQNSLKELGSNILNEEKPSYIEDKVENSHLQNDQLFLYYIQNGKDMYTGDELDIDHLSDYDIDHIIPQAFIKDDSIDNRVLTSSAKNRGKSDDVPSLDIVRARKAEWVRLYKSGLISKRKFDNLTKAERGGLTEADKAGFIKRQLVETRQITKHVAQILDARFNTESDENDKVIRDVKVITLKSNLVSQFRKDFEFYKVREINDYHHAHDAYLNAVVGTALLKKYPKLASEFVYGEYKKYDIRKFITNSSDKATAKYFFYSNLMNFFKRVIRYSNGKVIVRPVVEYSKDTEDIAWDKKSNFRTICKVLSYPQVNIVKKVETQTGGFSKESILPKGDSDKLIPRKTKKAYWDTKKYGGFDSPTVAYSVFVVADVEKGKAKKLKTVKELVGISIMERSFFEENPVEFLENKGYHNIREDKLIKLPKYSLFEFEGGKRRLLASASELQKGNEMVIPGHLVKLLYHAQRINSFNSTKYLDYVSAHKKEFEKVLSCVEDFANLYVDVEKNLSKIRAVADSMDNFSIEEISNSFINLLTLTALGAPADFNFLGEKIPRKRYTSTKECLNATLIHQSITGLYETRIDLSKIGEE

SEQ ID NO: 172 - protein, 1099 aa, Corynebacterium accolens
MSLLYRVGIDVGTYSLGCTAIEVDDNDQPVSILSSVSLIHDSGLDPDQQKRAVTRLASSGVARRTRRLYRRRRRRMVKLENFLTAQGWETLPFERYSDPYLPWHARVALVNGYISDDTQRGQYLSIAFRHIANHRGWRNPYWKVSSLYSPDKPSDAFEQIRKELEASTGRQIPETATVGQLISFAQFGKDRLRGGGKQKDKKKPQEQVNQAVISARLHQIDHAREINEICRVQKIDDTLRKQILDLVFAAESPKGAQKGRVGKDPLQPKLFRALKASDAFQQYRIAALTGNLRIYRNGVTVPLDRDEKLIVFNYLVNLPKKEEPSWLKIAEILNIDRGQLRGTATMTDDGERAGATPPVHDTNRTILDSKVKPLAHWWENASDDERAAMLKSLSNSEVEDFDSPAGAQVQAFFADLDETEQEKLDSLHLPMGRAAYSEDTLMRLTNRMLDENLDLYEARLAEFGIPKDWAPPAPRIGEPVGNPAVDRVLKGVARWLEAAADEWGAPKSVVIEHVRDGFVSKSKAIEIDRANNNRHKRNRELFQKMQENLGIEGKVRSSDLWRYQSVQRQNCQCAYCGSPITYTTCEMDHIVPRAGEGSTNTRDNLVATCHRCNLAKKNIPFAVWAEKSTIPGVSVKEALDRTRHWSEDSGMSKKDFQKFRKNVCERLNRTVVDEPLDARSMESVAWMANELRGRVAQRFQEENTTVNVYRGALTAEARRAAGITDKLRFIDGTGKSRLDRRHHAVDAAVVAFIHNYVAETLAIRSNKKREAQLLQGTSQWKEFTGSDDKHRAVWNAWIPKMQKLAVLLQIALDEDRIVVTSNLRLRLGNGRAHEDTISELKTIRVGDAISVTDIDRASSEALWCALTREPDFDEKDGLPENPNRRIRVHGTWYDAEDEIEVFPVGAGAIKVRGGYAKLSRFHHARVYKIPGKKAPIYCMLRVYNTDLVQHRHEDLFSVELKPQTMSVRQAEPKLRKALAENTAEYLGWLVTDDELIIDTSTFRTGLIEEMQSEFGLVRRWRLDGFDSPSLLTLRPLHMSAEGLPDDCALGSRKIIDTKGWRVSINKVFNAGNTTVVRRDALGRARLTSNAHLPISWKEE

SEQ ID NO: 173 - protein, 1054 aa, Actinobacillus pleuropneumoniae
MKLTPLNYILGLDLGIASVGWAVVEIDEQENPLGLIDVGVRTFDRAEVAKTGESLALARRLARSSRRLVKRRADRIKKVKRLLKSENILLSADEQLPNDVWQLRVKGLDQKLERQEWAAVLLHLLKHRGYLSQRKNESKSENKELGALRSGVAANHQILQSAEYRTPAEIAVKKFHVEEGHIRNQRGAYTHTFSRLDLLAEIELLFTRQTELGNPHTSAKLLENLTALLMWQKPALAGEAILKMLGKCTFEPTEYKAAKNSYSAERFVWLTKLNNLRILEQGAERALTDNERFALLDQPYEKAKFTYAQARTMLALPDEAIFKGVRYQGEDKKAVETKTILMEMKAYHQIRKALENADLKAEWNELKNNSELLDDIGTAFSLHKTDEDICRYLDGKLSESILNALLENLNFDKFIQLSLKALQQILPLMLQGQRYDEAVSAIYGDHYGKKSAEINRLLPTIPADEIRNPVVLRTLTQARKVINAVVRLYGSPARIHIETGREVGKSYQDRKKLEKQQEDNRKHRESAVQKFKEYFPNFVGEPKGKDILKMRLYELQQAKCLYSGKSLELHRLLEKGYVEVDHALPFSRTWDDSFNNKVLVLANENQNKGNLTPYEWLDGKNNSEPWQNFVARVQTSGFSHTKKQRILSHKLDEKGFIERNLNDTRYVVRFLCNFIADNMLLTGKGKRKVFASNGQITALLRGRWGLQKVRDDNDRHHALDAVVVACSTVAMQQKITRFVRYEEGNVFSGERIDRETGEIIPLHFPSPWAFFRENVEIRIFSENPKLELENRLPDYPQYNHEFVQPLFVSRMPTRKMTGQGHMETVKSAKRLDEGLSVLKVPLTQLKLNDLERMVNREREMALYESLKVRLEQFDNDPAKAFAEPFYKKGGALVKAVRVEQTQKSGVLVRDGNGVADNASMVRVDVFTKAGKYFLVPIYTWQVAKGILPNKAVTANVDEIDWLEMDESYQFIFTMYPNDLVKVKLKKEEFFGYYGGLDRATGAIVIKEHDLEKSKGRQGIYRIGVKLALSFEKYQVDELGKNIRPCRPTKRQHVR

SEQ ID NO: 174 - protein, 1369 aa, Lactobacillus iners
MNNNYYLGLDLGTNSVGWAVTDDHYNIIKFHGKHMWGMRLFEEAETAKDRRLHRQARRRRQRLVERINLLEELFDKEISKVDQGFFARKKESDLHFEDKTTKSEYALFNDKSYTDRDYYKQYPTIFHLIMDLIENDKKRDIRLVYLACHYLIKHRGHFIFDGKNFTVDNSFENLLDKLITYLKDNDDITLSFPKDQLINIFKNSNLNSTEKSDQLKPFFGRTNLEKGIIKLLSGGKQDLSNMFRDETLKNSNYKNLKFSDNRFDDERDGYAADLGDRIDLLILLKQIYDASILESMMSQARVSIDGHKYISSAKVCAYEKHKSDLKRLKSLIKKYLPSEYNNIFRKITEKDNYVAYSKSNITNNKREKALKYVKYVDFTKYLTKKLKTIKTQDAEDDQEIFEIKGELEKQSFLPKQRTLDNSIIPYQLHLMELKKILDNQSKYYDFLLAKDDQEGITVKDKIISLLTFRLPYYIGPVNPAVHGKFAWVKRLANGKVTPWNYKEKIDIDASHEEFIKTKLSKCSFLIGCDVLPKNSLLYQKYMVLSELNTIKFNGVNISEKLKDDIYQNLFKNIQKVTKKRLQNYIKEHENIIGDVIVTGIDNAFKQGLVSYLKFKKIIGDKVDDDRYQKVLEKIIRDITLYDECAGKKIKKEYKDSDLFTEDELNKIVKLTFNDWGRLSAELLDQLEGEDTVSGETGKIIEFMQKHNYNLMQLMSKKFTFKSKIDEINKSYYQHDKFNYKSMIDSLYVSPATKRILWQSLKVVHEISKIMKHDPEKIFIEMARSKEDHPKRKLSRKADLKQVYKDSKKQIISIIGKDKYQDLSNELDNKDDRDLRWDNLYLYYTQLGRSMYSLKPIDISELMNKNLYDQDHIFPKSKKYDDSIENRVLVEKELNVKKSDIYPISDANIIPQKIKGQVESFWKMLYDHKLIGDKKYARLIRSKAFTDDELAGFIARQLVETRQATKETADLLKRLCPKSRIVYAKAQNASIFRQKFDIPKSRTINDLHHAQDAYLNIVVGNIFDTKFTQDPRNFIKNTKDSRNYNLEKIYDYNVERNNYVAWIAPDGETNGTIANVKCNLSTKDFRVTRPSFYKKGALFNQNLSRKGSNLAPIKEHSPKSNPLKYGGYSGKNNSFFVVVAGKDNKGKDIVKLIPVNTLIYNKMLHCDYKAKQELLTSYVANNFAINNFRIVKDDIKMYSLVKIDGAYYYLVGGTDERIEVKNAMQLLLSKDSIKAVKILEKESKDQFANIKNYKDIDIKLGRTFNEVVSKYTNSVFGKSMLISDKYRKDIFKSVEKSILEFNHLDTIGKADNLLKFVTLMRPSGSAHSLKMVGLIERIRKSNVISNFNEFKLINQSVTGLFENEEDLLKL

SEQ ID NO: 175 - protein, 1420 aa, Bifidobacterium bifidum
MSRKNYVDDYAISLDIGNASVGWSAFTPNYRLVRAKGHELIGVRLFDPADTAESRRMARTTRRRYSRRRWRLRLLDALFDQALSEIDPSFLARRKYSWVHPDDENNADCWYGSVLFDSNEQDKRFYEKYPTIYHLRKALMEDDSQHDIREIYLAIHHMVKYRGNFLVEGTLESSNAFKEDELLKLLGRITRYEMSEGEQNSDIEQDDENKLVAPANGQLADALCATRGSRSMRVDNALEALSAVNDLSREQRAIVKAIFAGLEGNKLDLAKIFVSKEFSSENKKILGIYFNKSDYEEKCVQIVDSGLLDDEEREFLDRMQGQYNAIALKQLLGRSTSVSDSKCASYDAHRANWNLIKLQLRTKENEKDINENYGILVGWKIDSGQRKSVRGESAYENMRKKANVFFKKMIETSDLSETDKNRLIHDIEEDKLFPIQRDSDNGVIPHQLHQNELKQIIKKQGKYYPFLLDAFEKDGKQINKIEGLLTFRVPYFVGPLVVPEDLQKSDNSENHWMVRKKKGEITPWNFDEMVDKDASGRKFIERLVGTDSYLLGEPTLPKNSLLYQEYEVLNELNNVRLSVRTGNHWNDKRRMRLGREEKTLLCQRLFMKGQTVTKRTAENLLRKEYGRTYELSGLSDESKFTSSLSTYGKMCRIFGEKYVNEHRDLMEKIVELQTVFEDKETLLHQLRQLEGISEADCALLVNTHYTGWGRLSRKLLTTKAGECKISDDFAPRKHSIIEIMRAEDRNLMEIITDKQLGFSDWIEQENLGAENGSSLMEVVDDLRVSPKVKRGIIQSIRLIDDISKAVGKRPSRIFLELADDIQPSGRTISRKSRLQDLYRNANLGKEFKGIADELNACSDKDLQDDRLFLYYTQLGKDMYTGEELDLDRLSSAYDIDHIIPQAVTQNDSIDNRVLVARAENARKTDSFTYMPQIADRMRNFWQILLDNGLISRVKFERLTRQNEFSEREKERFVQRSLVETRQIMKNVATLMRQRYGNSAAVIGLNAELTKEMHRYLGFSHKNRDINDYHHAQDALCVGIAGQFAANRGFFADGEVSDGAQNSYNQYLRDYLRGYREKLSAEDRKQGRAFGFIVGSMRSQDEQKRVNPRTGEVVWSEEDKDYLRKVMNYRKMLVTQKVGDDFGALYDETRYAATDPKGIKGIPFDGAKQDTSLYGGFSSAKPAYAVLIESKGKTRLVNVTMQEYSLLGDRPSDDELRKVLAKKKSEYAKANILLRHVPKMQLIRYGGGLMVIKSAGELNNAQQLWLPYEEYCYFDDLSQGKGSLEKDDLKKLLDSILGSVQCLYPWHRFTEEELADLHVAFDKLPEDEKKNVITGIVSALHADAKTANLSIVGMTGSWRRMNNKSGYTFSDEDEFIFQSPSGLFEKRVTVGELKRKAKKEVNSKYRTNEKRLPTLSGASQP

SEQ ID NO: 176 - protein, 1092 aa, Ilyobacter polytropus
MKYSIGLDIGIASVGWSVINKDKERIEDMGVRIFQKAENPKDGSSLASSRREKRGSRRRNRRKKHRLDRIKNILCESGLVKKNEIEKIYKNAYLKSPWELRAKSLEAKISNKEIAQILLHIAKRRGFKSFRKTDRNADDTGKLLSGIQENKKIMEEKGYLTIGDMVAKDPKFNTHVRNKAGSYLFSFSRKLLEDEVRKIQAKQKELGNTHFTDDVLEKYIEVFNSQRNFDEGPSKPSPYYSEIGQIAKMIGNCTFESSEKRTAKNTWSGERFVFLQKLNNFRIVGLSGKRPLTEEERDIVEKEVYLKKEVRYEKLRKILYLKEEERFGDLNYSKDEKQDKKTEKTKFISLIGNYTIKKLNLSEKLKSEIEEDKSKLDKIIEILTFNKSDKTIESNLKKLELSREDIEILLSEEFSGTLNLSLKAIKKILPYLEKGLSYNEACEKADYDYKNNGIKFKRGELLPVVDKDLIANPVVLRAISQTRKVVNAIIRKYGTPHTIHVEVARDLAKSYDDRQTIIKENKKRELENEKTKKFISEEFGIKNVKGKLLLKYRLYQEQEGRCAYSRKELSLSEVILDESMTDIDHIIPYSRSMDDSYSNKVLVLSGENRKKSNLLPKEYFDRQGRDWDTFVLNVKAMKIHPRKKSNLLKEKFTREDNKDWKSRALNDTRYISRFVANYLENALEYRDDSPKKRVFMIPGQLTAQLRARWRLNKVRENGDLHHALDAAVVAVTDQKAINNISNISRYKELKNCKDVIPSIEYHADEETGEVYFEEVKDTRFPMPWSGFDLELQKRLESENPREEFYNLLSDKRYLGWFNYEEGFIEKLRPVFVSRMPNRGVKGQAHQETIRSSKKISNQIAVSKKPLNSIKLKDLEKMQGRDTDRKLYEALKNRLEEYDDKPEKAFAEPFYKPTNSGKRGPLVRGIKVEEKQNVGVYVNGGQASNGSMVRIDVFRKNGKFYTVPIYVHQTLLKELPNRAINGKPYKDWDLIDGSFEFLYSFYPNDLIEIEFGKSKSIKNDNKLTKTEIPEVNLSEVLGYYRGMDTSTGAATIDTQDGKIQMRIGIKTVKNIKKYQVDVLGNVYKVKREKRQTF

SEQ ID NO: 177 - protein, 994 aa, Streptococcus downei
MENQRGKRQRITHQEPYSIGLDIGTASVGSAVINNDLTVPQKRFKVRDINGNVIKTIKKNMSSVLIFDEANPAKGARTKRTSRRRYTRRNFRLLELKKLFEKEIEKIDPNFFHRIKEDSFFNWNDKEFDKHPLFGNLKEEKKFHNNYPTVFHLRNEIGKNSSKKFDLRLVYLALAHIIKYRGHFLDETFDPDASVSVEKRLNDFIVEYNELFDKDLRSEAKFSEILMSDSSNSVKIESTLSLYPSEKNTIFQVFLKLIVGNQGDFNKFFKDELESSSHSGKLVFSSDEVEDEKEELISIIGEDYLDIINLCQSLYSTVALAKIISTDTGESNTPLSASMVKRYNEHKGDLANLKGIVKHFIPEKYEEVFGEHSKTGYTAYIRNPNKMPEKKFYDYLYHEGEKGKISGILSDSRIYELPAVQKFILKIEQKSFLKKQRTKENGLIPYQLHLKELKIIIENQSEYYPFLHEIEEKLEKLLTFRIPYFVGPLAQTKYINPRFNWLVRKSEDHIKPWNFSEIVDEEKSATKFIEKLISNDQFLFGEKVLPKRSIIYQQFLIFNELTKVSYQIKDGPSRNFDSETKEEIFNSLFKKNKLGCVTVVDLKNYIKNDQCLSEKEDIQIEGIKKKFNSSYSTYADLSEISGLKELLDDDTQLDLVEEIIRILTVFEDKKMRTKQLEKLNLPANVDIEKLCKKHYKGWANVSRQLIDGIADRSRGFKKTILDYLKDDDIPNNDAFSTKVQKSLNRNFAQLITDKSLDFARKLDESYKIDVKKDYPSLVEDIPGSPAIRRAILQSLYTVDEIIGVMGRMPKNIVIEMARTNEVSDSPKTRKERIKKLIKETENDADALNFGISKVSEIFDEVKKDENLFKELEVYLYFLQEGKDMYGTETREGHRQPKEINFYDVKNSTGKYHIDHIIPQSLYSGNPLDNIVLTESTNNKIKDKDVPDEATVYEMKNFWLYLMKKGAISKKKFSFLTKIEQGGLSNEDKFGFINR

SEQ ID NO: 178 - protein, 1052 aa, Aminomonas paucivorans
MIGEHVRGGCLFDDHWTPNWGAFRLPNTVRTFTKAENPKDGSSLAEPRRQARGLRRRLRRKTQRLEDLRRLLAKEGVLSLSDLETLFRETPAKDPYQLRAEGLDRPLSFPEWVRVLYHITKHRGFQSNRRNPVEDGQERSRQEEEGKLLSGVGENERLLREGGYRTAGEMLARDPKFQDHRRNRAGDYSHTLSRSLLLEEARRLFQSQRTLGNPHASSNLEEAFLHLVAFQNPFASGEDIRNKAGHCSLEPDQIRAPRRSASAETFMLLQKTGNLRLIHRRTGEERPLTDKEREQIHLLAWKQEKVTHKTLRRHLEIPEEWLFTGLPYHRSGDKAEEKLFVHLAGIHEIRKALDKGPDPAVWDTLRSRRDLLDSIADTLTFYKNEDEILPRLESLGLSPENARALAPLSFSGTAHLSLSALGKLLPHLEEGKSYTQARADAGYAAPPPDRHPKLPPLEEADWRNPVVFRALTQTRKVVNALVRRYGPPWCIHLETARELSQPAKVRRRIETEQQANEKKKQQAEREFLDIVGTAPGPGDLLKMRLWREQGGFCPYCEEYLNPTRLAEPGYAEMDHILPYSRSLDNGWHNRVLVHGKDNRDKGNRTPFEAFGGDTARWDRLVAWVQASHLSAPKKRNLLREDFGEEAERELKDRNLTDTRFITKTAATLLRDRLTFHPEAPKDPVMTLNGRLTAFLRKQWGLHKNRKNGDLHHALDAAVLAVASRSFVYRLSSHNAAWGELPRGREAENGFSLPYPAFRSEVLARLCPTREEILLRLDQGGVGYDEAFRNGLRPVFVSRAPSRRLRGKAHMETLRSPKWKDHPEGPRTASRIPLKDLNLEKLERMVGKDRDRKLYEALRERLAAFGGNGKKAFVAPFRKPCRSGEGPLVRSLRIFDSGYSGVELRDGGEVYAVADHESMVRVDVYAKKNRFYLVPVYVADVARGIVKNRAIVAHKSEEEWDLVDGSFDFRFSLFPGDLVEIEKKDGAYLGYYKSCHRGDGRLLLDRHDRMPRESDCGTFYVSTRKDVLSMSKYQVDPLGEIRLVGSEKPPFVL

SEQ ID NO: 179 - protein, 1023 aa, Helicobacter cinaedi
MKIYSFDIGVASIGWAFIENEVLQDCGIRIFTKAENPKNGASLALPRREARGVRKRLARRRGRLNTIKQLLCKEFGLQLEDYLSNDGELPKAYTASKANPLKSPYELRTLALSQKLDSKDLVRVILHIAKHRGYGNKHAKDSKDTESGKVKKAIEFNRKTLAEKGYRSVGEYLYREFFQQSRISQNNGATEFINVRNKAGNYEHCVAQDMLKEELESILNAQRQFGFSLKQDFENKLLTKIFEQRPLKSFADKVGNCCFIAGEKRAPKDSPSAIEFIALSRTINTLINLSKESGEIYNRAIILQIVESTLKKGEISYKELREIIRLDERLRFKDPRLDYSREIKEAEKVKFLEFKQLKGFKKALGESFTTLAISQLDEIAEHIALIKDRVKLNEKLESYALTKEQREALSNLSFSAHINLSLQALKQILPFMRGDNGEQCLDYDESVEKAGLKALSKDTLKGQMLPPLNEFEPYLSNPVVARALAEYRKVLNVLLKQYGSPHKIHIEYAREAKLSSTERQKYEKEQKDNYAANQAAHKKCQELGLEPSSTNLLKLKLWQEQGGLCLYSGAKITISYLQDPTALQVDHIYPYSRSFDDSYMNKCLVLTKANQEKGNRTPFEAFGTDSAKWGVITTLAQKLPHKKRRRILNTAFNDKEAGFKLRNLNDTSYIARLVADYTETYLEFLPLVESENTTLSKGQKGSKKHIAIVNGVLTSTMRYYLGFASKDRDNHLHHALDAVIIGFMNDSVIKAFSDFKKTQETSKAAYYAHTLSKQEYKKQRAFIQLPSGENFRVSVLEKVESVFVSKPPRKRVRGALHEATFYSPNDPKLLKNYGGTKGVERALALGKMRKVGAKIVSNGAMVRVDIFRHKSSGKFYGVPVYTMDFALGILPNKAVVVGKDQNGVIKDWLEMDSSYEFIFSLYKDDVILVQKKEMQRPELCYFVSFDTSGASIKVAKHDNNFSTLTENQKLLFSNATKEEVVGKSIGIQNLKVFEKWQVSVLGEVKRTQSYPRENISLASKAKK

SEQ ID NO: 180 - protein, 874 aa, Listeria seeligeri
LANGQSEFSWLTRKADGEIRPWNIEEKVDFGKSAIDFIEKMTNKDTYLPKENVLPKHSMCYQKYMVYNELTKIRYTDDQGKTHYFSGQEKQQIFNDLFKQKRKVKKKDLELFLYNMNHVESPTVEGVEDAFNSSFTTYHDLQKVGVPQEILDDPLNTEMLEEIIKILTVFEDKRMINERLQEFSNVLDEAVLKKLERRHYTGWGRLSAKLLIGIRDKESHLTILDYLMNDDKHNRNLMQLINDSNLSFKSIIEKEQVSTADKDIQSIVADLAGSPAIKKGILQSLKIVDELVGIMGYPPQTIVVEMARENQTTGKGKNNSKPRFTSLEKAIKELGSQILKEHPTDNQGLKNDRLYLYYLQNGKDMYTGQELDIHNLSNYDIDHVVPQSFITDNSIDNRVLASSAANREKGDNVPSLEVVRKRKVYWEKLYQAKLMSKRKFDYLTKAERGGLTEADKARFIHRQLVETRQITKNVANILHQRFNCKKDESGNVIEQVRIVTLKAALVSQFRKQFQLYKVREVNDYHHAHDAYLNCVVANTLLKVYPQLEPEFVYGDYHQFDWFKANKATAKKQFYTNIMLFFAKKDRIIDENGEILWDKKYLDTIKKVLNYRQMNIVKKTEIQKGEFSNATANPKGNSSKLIPRKADWDPIKYGGFDGSNMAYAIVIEHEKRKKKTVIKKELIQINIMERTAFEKDQKEFLEGKGYRNPKVITKIPKYTLYECENGRRRMLGSANEAQKGNQMVLPNHLMTLLYHAKNCEASDGKSLAYIESHREMFAELLDSISEFASRYTLADANLEKINTIFEQNKSGDVKVIAQSFVNLLEFNAMGAPASFKYFETNIERKRYNNLKELLNATIIYQSITGLYEARKRLDD

SEQ ID NO: 181 - protein, 1082 aa, Neisseria lactamica
MAAFKPNPMNYILGLDIGIASVGWAMVEIDKEENPIRLIDLGVRVFERAEVPKTGDSLAMARRLARSVRRLTRRRAHRLLRARRLLKREGVLQDADFDENGLVKSLPNTPWQLRAAALDRKLTCLEWSAVLLHLIKHRGYLSQRKNEGETADKELGALLKGVADNAHALQTGDFRTPAELALNKFEKESGHIRNQRGDYSHTFSRKDLQAELNLLFEKQKEFSNPHVSDSLKEGIETLLMAQRPALSGDAVQKMLGHCTFEPAEPKAAKNTYTAERFIWLTKLNNLRILEQGSERPLTDTERATLMDEPYRKSKLTYAQARKLLGLEDTAFFKGLRYGKDNAEAPTLMEMKAYHAISRALEKEGLKDKKSPLNLSTELQDEIGTAFSLFKTDKDITGRLKDRVQPEILEALLKHISFDKFVQISLKALRRIVPLMEQGKRYDEACAEIYGDHYCKKNAEEKIYLPPIPADEIRNPVVLRALSQARKVINCVVRRYGSPARIHIETAREVGKSFKDRKEIEKRQEENRKDREKAAAKFREYFPNFVGEPKSKDILKLRLYEQQHGKCLYSGKEINLVRLNEKGYVEIDHALPFSRTWDDSFNNKVLVLGSENQNKGNQTPYEYFNGKDNSREWQEFKARVETSRFPRSKKQRILLQKFDEEGFKERNLNDTRYVNRFLCQFVADHILLTGKGKRRVFASNGQITNLLRGFWGLRKVRAENDRHHALDAVVVACSTVAMQQKITRFVRYKEMNAFDGKTIDKETGEVLHQKAHFPQPWEFFAQEVMIRVFGKPDGKPEFEEADTPEKLRTLLAEKLSSRPEAVHEYVTPLFVSRAPNRKMSGQGHMETVKSAKRLDEGISVLRVPLTQLKLKGLEKMVNREREPKLYDALKAQLETHKDNPAKAFAEPFYKYDKAGNRTQQVKAVRIEQVQKTGVWVRNHNGIADNATMVRVDVFEKGGKYYLVPIYSWQVAKGILPDRAVVAFKDEEDWTVMDDSFEFRFVLYANDLIKLTAKKNEFLGYFVSLNRATGAIDIRTHDTDSTKGKNGIFQSVGVKTALSFQKNQIDELGKEIRPCRLKKRPPVR

SEQ ID NO: 182 - protein, 1326 aa, Streptococcus pseudoporcinus
MLGTVLFDSGETAQARRLKRTNRRRYTRRRYRLCQLQNIFATEMVKVDDTFFQRLSESFFYYQDKAFDKHPIFGNSKEERAYHKTYPTIYHLRKDLADRDQKADLRLIYLALSHIIKFRGHFLIEGKLNSENTDVQKLFIALVTVYNLLFEEEPIAGETCDAKALLTAKTSKSKRLESLISEFPGQKKNGLFGNLLALALGLRPNFKSNFGLSEDAKLQITKDTYEEELDNLLAEIGDHYADLFLAAKNLSDAILLSDILTLSDENTRAPLSASMIKRYEEHQEDLALLKKLVKEQMPEKYWEIFSNAKKNGYAGYIEGKVSQEDFYRYIKPILSRLKGGDEFLAKIDRDDFLRKQRTFDNGSIPHQIHLKELHAILRRQEKYYPFLAEQKEKIEQLLCFRIPYYVGPLAKGGNSSFAWLKRRSDEPITPWNFKDVVDEEASAQAFIEGMTNYDTYLPEEKVLPKHSPLYEMFTVYNELTKVKYIAENMTKPLYLSAEQKEAIIDHLFKQTRKVTVKDLKEKYFSQIEGLENVDVTGVEGAFNASLGTYNDLLKIIKDKAFLDDEANAEILEEIVLILTLFQDEKLIEKRLAKYANLFEKSVLKKLRKRHYRGWGRLSRQLIDGMKDKASGKTILDFLKADDFANRNFIQLINDSSLDFEKLIDDAQKKAIKRESLTEAVANLAGSPAIKKGILQSLKVVDEIVKVMGHNPDNIVIEMSRENQTTAQGLKNARQRLKKIKEVHKKTGSRILEDNSERITNLTLQDNRLYLYLLQDGKDMYTGQDLDINNLSQYDIDHIIPQSFIKDNSIDNLVLTTQKANRGKSDNVPSIEVVRDMKDRVWRRQLANGAISRQKFDHLTKAERGGLADSDKARFLRRQLVETRQITKHVAQLLDSRFNSKSNQNKKLARNVKIITLKSKIVSDFRKDFGLYKLREVNNYHHAHDAYLNAVVGTALLKKYPKLEAEFVYGDYKHFDLVKLISKSDPSLGKATAKVFFYSNIMNFFKEELSLADGTLMKRPVIETNTETGEVVWDKVKDFKTIRKVLSYPQVNIVKKTEIQSGAFSKESVLSKGNSDKLIERKKGWDPKKYGGFDSPNTAYSIFVVAKVAKRKAQKLKTVKEIVGITIMEQAEYEKDNIAFLEKKGYQDIQEKLLIKLPKYSLFELENGRRRLLASANEFQKGNELALSGKYMKFLYLASRYDKLSSKIESEQQKKLFVEQHLHYFDEILDIVVKHATCYIKAENNLKKIISLYKKKEAYSINEQALNMLNLFIFTSLGAPSTFVFFDETIDRKRYTTSSDVLNGILIQQSITGLYETRIDLSRFGGD

SEQ ID NO: 183 - protein, 1150 aa, Enterococcus faecalis
MYSIGLDLGISSVGWSVIDERTGNVIDLGVRLFSAKNSEKNLERRTNRGGRRLIRRKTNRLKDAKKILAAVGFYEDKSLKNSCPYQLRVKGLTEPLSRGEIYKVTLHILKKRGISYLDEVDTEAAKESQDYKEQVRKNAQLLTKYTPGQIQLQRLKENNRVKTGINAQGNYQLNVFKVSAYANELATILKTQQAFYPNELTDDWIALFVQPGIAEEAGLIYRKRPYYHGPGNEANNSPYGRWSDFQKTGEPATNIFDKLIGKDFQGELRASGLSLSAQQYNLLNDLTNLKIDGEVPLSSEQKEYILTELMTKEFTRFGVNDVVKLLGVKKERLSGWRLDKKGKPEIHTLKGYRNWRKIFAEAGIDLATLPTETIDCLAKVLTLNTEREGIENTLAFELPELSESVKLLVLDRYKELSQSISTQSWHRFSLKTLHLLIPELMNATSEQNTLLEQFQLKSDVRKRYSEYKKLPTKDVLAEIYNPTVNKTVSQAFKVIDALLVKYGKEQIRYITIEMPRDDNEEDEKKRIKELHAKNSQRKNDSQSYFMQKSGWSQEKFQTTIQKNRRFLAKLLYYYEQDGICAYTGLPISPELLVSDSTEIDHIIPISISLDDSINNKVLVLSKANQVKGQQTPYDAWMDGSFKKINGKFSNWDDYQKWVESRHFSHKKENNLLETRNIFDSEQVEKFLARNLNDTRYASRLVLNTLQSFFTNQETKVRVVNGSFTHTLRKKWGADLDKTRETHHHHAVDATLCAVTSFVKVSRYHYAVKEETGEKVMREIDFETGEIVNEMSYWEFKKSKKYERKTYQVKWPNFREQLKPVNLHPRIKFSHQVDRKANRKLSDATIYSVREKTEVKTLKSGKQKITTDEYTIGKIKDIYTLDGWEAFKKKQDKLLMKDLDEKTYERLLSIAETTPDFQEVEEKNGKVKRVKRSPFAVYCEENDIPAIQKYAKKNNGPLIRSLKYYDGKLNKHINITKDSQGRPVEKTKNGRKVTLQSLKPYRYDIYQDLETKAYYTVQLYYSDLRFVEGKYGITEKEYMKKVAEQTKGQVVRFCFSLQKNDGLEIEWKDSQRYDVRFYNFQSANSINFKGLEQEMMPAENQFKQKPYNNGAINLNIAKYGKEGKKLRKFNTDILGKKHYLFYEKEPKNIIK

SEQ ID NO: 184 - protein, 1150 aa, Enterococcus faecalis
MYSIGLDLGVSSVGWSVIDERTGNVIDLGVRLFSAKNSEKNLERRTNRGGRRLIRRKTNRLKDAKKILAAVGFYEDKSLKNSCPYQLRVKGLTEPLSKGEIYKVTLHILKKRGISYLDEDDTEAAKESQDYKEQVRENAQLLTKYTPGQIQLQRLKENNRVKTGINAQGNYQLNVFKVSAYANELATILKTQQAFYPNELTDDWIALFVQPGIAEEAGLIYRKRPYYHGPGNEANNSPYGRWSDFKKTGQPATNIFDKLIGKDFQGELRASGLSLSAQQYNLLNDLTNLKIDGEIPLSPEQKEYILAELMTKEFTRFGINDVAKLLGVKKERLSGWRLDKKGKPEIHTLKGYRNWRKIFAESGIDLATLPTETIDCLAKVLTLNTEREGIENTLAFELPELAESVKLLVLDRYKELSQSVSTQAWHRFSLKTLHLLIPELMNATSEQNTLLEQFQLKSDVRKRYSEYKKLPTKDVLTEIYNPTVNKTVSQAFKVIDALLVKYGKEQIRYITIEMPRDDNEEDEKKRIKELHAKNSQRKNDSQSYFMQKSGWSQEKFQTTIQKNRRFLAKLLYYYEQDGICAYTGLSISPELLVSDSTEIDHIIPISISLDDSINNKVLVLSKANQVKGQQTPYDAWMDGSFKKINGKFSNWDDYQKWVESRHFSHKKENNLLETRNIFDSEQVEKFLARNLNDTRYASRLVLNTLQSFFANQETKVRVVNGSFTHTLRKKWGADLDKTRETHHHHAVDATLCAVTPFVKVSRYHYAVKEETGEKVMREIDFETGEIVDEMSYREFKKSKKYERKTYQVKWPNFREQLKPVNLHPRIKFSHQVDRKANRKLSDATIYSVREKTEVKTLKSGKQKITTDEYTIGKIKDIYTVDGWEAFKKKQDKLLMKDLDEKTYERLLSIAETTPDFQEVEEKNGKVKRVKRSPFAVYCEENDIPAIRKYAKNNNGPLIRSLKYYDGKLNKHINITKDSQGRPVEKTKNGRKVTLQSLKPYRYDIYQDLETKAYYTVQLYYSDLRFVEGKYGITEKEYMKKVAEQTKGQVVRFCFSLQKNDGLEIEWKDSQCYDVRFYNFQSANSINFKGLEQEMMPAENQFKQKPYNNGAINLNIAKYGKEGKKLRKFNTDILGKKHYLYYEKEPKNIIK

SEQ ID NO: 185 - protein, 1345 aa, Streptococcus anginosus
MDQKYSIGLDIGTNSVGWAVVTDDYKVPAKKMKVLGNTDKQSIKKNLLGALLFDSGETAEATRLKRTARRRYTRRRNRLRYLQEIFAEEMNKVDENFFQRLDDSFLVDEDKRGERHPIFGNIAAEVKYHDDFPTIYHLRKHLADISQKADLRLVYLALAHMIKFRGHFLIEGQLKAENTNVQALFKDFVEVYDKTVEESHLSEMTVDALSILTEKVSKSRRLENLIAHYPAEKKNTLFGNLIALSLGLQPNFKTNFQLSEDAKLQFSKDTYEEDLEGLLGEIGDEYADLFASAKNLYDAILLSGILTVDDNSTKAPLSASMVKRYEEHQKDLKKLKDFIKVNAPDQYNAIFKDKNKKGYAGYIENGVKQDEFYKYLKGILLQINGSGDFLDKIDREDFLRKQRTFDNGSIPHQIHLQEMHAILRRQEEHYPFLKENQDKIEKILTFRIPYYVGPLARKGSRFAWAEYKADEKITPWNFDDILDKEKSAEKFITRMTLNDLYLPEEKVLPKHSLLYETFTVYNELTKVKYVNEQGEAKFFDANMKQEIFDHVFKENRKVTKDKLLNYLNKEFEEFRIVNLTGLDKENKAFNSSLGTYHDLRKILDKSFLDDKANEKTIEDIIQTLTLFEDREMIRQRLQKYSDIFTKAQLKKLERRHYTGWGRLSYKLINGIRNKENKKTILDYLIDDGYANRNFMQLINDDALSFKEEIARAQIIGDVDDIANVVHDLPGSPAIKKGILQSVKIVDELVKVMGHNPANIIIEMARENQMTDKGRRNSQQRLKLLQDSLKNLDNPVNIKNVENQQLQNDRLFLYYIQNGKDMYTGETLDINNLSQYDIDHIIPQAFIKDNSLDNRVLTRSDKNRGKSDDVPSIEVVHEMKSFWSKLLSVKLITQRKFDNLTKAERGGLTEEDKAGFIKRQLVETRQITKHVAQILDERFNTEFDGNKRRIRNVKIITLKSNLVSNFRKEFELYKVREINDYHHAHDAYLNAVVGNALLLKYPQLEPEFVYGEYPKYNSYRSRKSATEKFLFYSNILRFFKKEDIQTNEDGEIAWNKEKHIKILRKVLSYPQVNIVKKTEEQTGGFSKESILPKGESDKLIPRKTKNSYWNPKKYGGFDSPVVAYSILVFADVEKGKSKKLRKVQDMVGITIMEKKRFEKHPVDFLEQRGYRNVRLEKIIKLPKYSLFELENKRRRLLASARELQKGNELVIPQRFTTLLYHSYQIEKNYEPEHREYVEKHKDEFKELLEYISVFSRKYVLADNNLTKIEMLFSKNKDAEVSSLAKSFISLLTFTAFGAPAAFNFFGENIDRKRYTSVTECLNATLIHQSITGLYETRIDLSKLGED

SEQ ID NO: 186 - protein, 849 aa, Listeria ivanovii
  VARIANT 780: note = Xaa can be any naturally occurring amino acid
LIDKNGTPQHITMIDKMRGKCTYFPEEVRIAKMSYTAELFGLLNDFNNIYFADPETGEKIGFTEADKKYFIDTFIHDQKGVKNITLKQIMKHKNIINETDIFGYRINTKNGTPIFTEFKGLKALKKALKEVDLPDEFYQNTEMMDEIANILSSEKSFTRREEQLKELFLAAFNDELEEAVKELINDITFKEFHSLSKKAIMVILPELWSTNQNQMQLFVQHKMDKSRLENLQNGTKIQFDDEAILSTIAKRAHRETIKIVDAVRAKYGELDYVIVEMAREKNSDEQKKVYNRAQKKQGDFEKEMCKLLGVSELKELRLNGKQHLALKFWKEQDGKCIYSGKPIALSDIVNNFNGLLEIDHIIPISISYDDSQQNKVLCLRSENQRKGQLSPYQYLIRGMGERSFDAFKAEVLSRHFGKKKQNYLLEMEDIANNDELRKHFINRNLVDTRYAMRTFSNTLKTFYTVNGIPTKVMPVNGAMTSALRKRAKLNKDRDAGHAHHAIDALIVAAIGRLPLIKQLAELRVNEEGEFADKITDKGLDDKTAFDDKTLKFLRNLLNYESKVKYSHKVDRKPNRSLSKQTLYSTREKDGEKYIIGKVKNIYTLDKAGYAALKKRIDKNPEDFLMAQHNPKTWEEIIKIMEVYSKADNPFKEFYDEHGFIMKDGKVPVKSLRYHDKKLGIHVPLTHKYENTRHDVVLLKRNSLRVDIYMNKEGVYKYQGVPYNWFNQKGDKYILDMEKYHNEIDGTRASFKNIDNTFEFQFSLYKNDVFSYMKKDKEGEXVSYTKLFRSDSSPRENRLEVENIDMRTSSQQMPTINPLKNLIKYNTDILGNTYPIQKEKFVTVFTLHSK

SEQ ID NO: 187 - protein, 1457 aa, Prevotella buccae
MKTILGLDLGTNSIGWAKVSVDDYGNYLHDIKLGSRIIPMSQDVLGNFDSGVTVSQTAQRTEFRSKRRLVQRNLQRRERLHRVLHVLDFLPAHYDAAIGWDRTEAVTYGKFLNHAEPKLAWEELGNGKRRFLFMDSFHEMVADFARCQPALVADGKKIPLDWTIYYLRKKALTQAITKEELAWILLNFNQKRGYYQLRGEEEEENPTKQEEYYELKVVSVEATDSRKGNDTWYNVHLENGWIYRRSSKISLDDWVGKVKQFIVTTEYEKDGATLKTDKEGYVKRSFRAPNENDWGLRKKRTETLLEMSGKTVGAFIYDHLLQEPADKIRGNFIRTIERHYYKAELEAILAEQCKYHIELRDKEMLEACARELYLNNLPHQRSLMKKDMTYLLLYDLIFYQRPLKSKKALIANCPYEYYEYVDKETGEIKRQNIKCIAKSNPYFQEFRLWQFVLNLRLFDRVEDKEVTANYLPTADDHARLFTYLNDRKEINQETLLKDYFKLKKVKIGNEKEYPIRWNYIEDKEKKYPCNETRYELLMALDRAGIEHKWLDDNNLEYRLWHLLYSVEVKSESETALRKLKNDDAFVNSFLKVKPFKKEYGAYSEKAIKRLLAVMRKGFLWNEQDICDETRKRIEIIIKGDVDEKVKERMGHAAYSFDRVSDFQGLPEWLACYVVYGRHSEAMDIQHWDSPERLMAYINNFKQYSLRNPIVEQCILETLRTVHDIWKETGQIDEIHVELGREMKSTSEERARRTQNVLRNENTNLRIKSLLIELKNDTDICNVHPYSPMQQEILRIYEEGALQELNREDEDFEEISKISQMSQPSGKELNRYKLWLEQKYRSPYTGKAISLAKLFTPAYQIEHVIPQSRYFDDSFTNKVICEAEVNTLKSNLLGYEFIKKHGGEIIHCTTLGDVRIFSESEYKAFVMDHYANNKSKKDKLLMEDIPQEFLSRQMNDSRYISKVVKTLLSNIVRMADESEATSKSVIVCTGGVTDRLKKDWGLNDVWNSIVYSRFERLNRLTGTEAFGHWENKDGKRVFQTSMPLELQRGFRKKRIDHRHHAMDALVIACASRNIVNYLNNESANNPKKREDLRRQLCDKNRVIRKPWETFTQDAYNALENVVVSFKNYVRVINKATNRYEHYDENGKKRFVQQKGSELWAIRKPMHKETYYGHVNLRRKELVTLQKALDDIPSICDKKLRDYISALVEKHFNKRQLLAHFKSTDYYWQKQYVNKVYVWTFSDDIKPLVATRKLLDTSFDAKRIGTITDTGIQKILRNYLEAKGGNATLAFTPEGIAEMNQNISKYNDGKPHQPILKVRITEPMGAKYRVGQTGNKMAKYVEAQSGTNLYFAIYEDSEGKRSYTTVPLDEVAERLKQRLSPVPEKDENDVPLKFYLSPNDLVYVPTEEELQLRECKLNKDRIYKMVSSTGNECHFIPYYVANVIYNKGGFNMQMHRPQS

SEQ ID NO: 188 - protein, 1330 aa, Enterococcus italicus
MKNDYTIGLDIGTNSVGYSVVTDDYKVISKKMNVFGNTEKKSIKKNFWGVRLFESGQTAQEARMKRTSRRRIARRKNRICYLQEIFQPEMNHLDNNFFYRLNESFLVADDAKYDKHPIFGTLDEEIHFHEQFPTIYHLRKYLADGDEKADLRLVYLAIAHIIKFRGNFLIEGELNTENNSVIELSKVFVQLYNQTLSELEGFQFIDESIDFSEVLTQQLSKSERADNVLKLFPDEKGTGIFAQFIKLIVGNQGNFKKVFQLEEDQKLQLSTDDYEENIENLLAIIGDEYGDIFVAAQNLYQAILLAGILTSTEKTRAKLSASMIQRYEEHAKDLKLLKRFVKEHIPDKYAEIFNDATKNGYAGYIDGKTKEEEFYKYLKTTLVQKSGYQYFIEKIEQENFLRKQRIYDNGVIPHQVHAEELRAILRKQEKYYSFLKENHEKIEQIFKVRIPYYVGPLAKHNEQSRFAWNIRKSDEPIRPWNMNDVVDENASAVAFIERMTIKDIYLNENVLPRHSLIYEKFTVFNELTKVLYADDRGVFQRFSAEEKEDIFEKLFKSERKVTKKKLENYLRIELSISSPSVKGIEEQFNANFGTYLDLKKFDELHPYLDDEKYQDTLEEVIKVLTVFEDRSMIQNQLEQLPLNLSTKTIKALSRRKYTGWGRLSARLIDGIHDKNSGKTILDYLIEDESDSYIVNRNFMQLINDDHLSFKKIIEDSQPYKEQQSAEEIVSELSGSPAIKKGILQSLKIVDELVAIMGYKPKNIVVEMARENQTTGRGKQNSKPRLKGIENGLKEFSDSVLKGSSIDNKQLQNDRLYLYYLQNGKDMYTGHELDIDHLSTYDIDHIIPQSFLTDNSIDNRVLTTSKSNRGKSDNVPSEEVVRKMDRFWRKLLNAKLISERKYTNLTKKELTESDKAGFLKRQLVETRQITKHVATILDSKFNEDSNNRDVQIITLKSALVSEFRKTFNLYKVREINDLHHAHDAYLNAVVALSLLRVYPQLKPEFVYGEYGKNSIHDQNKATIKKQFYSNITRYFASKDYIINDDGEILWNKQETIAQVIKTLGMHQVNVVKKVEIQKGGFSKESIQPKGESQKLIRRKQQWNTKKYGGFDSPVVAYAILLSFDKGKRKARSFKIVGITIQDRESFEGNPILYLSKKDYHNPKVEAILPKYSLFEFENGRRRMVASASETQKGNQLIIPGHLMELLYHSKKIINGKNSDSVSYIQNNKEKFREIFEYIVDFSSKYISADANLNKIEKIFENNFHKASEQEIAKSFINLLTFTAMGAPADFEFFGEKIPRKRYVSISEIIDAVFIHQSITGLYETRVRLTEV

SEQ ID NO: 189 - protein, 1123 aa, Mobiluncus curtisii
MFVYLNSPRGFGPATFLTDLPHFCIIFGNNDFMDNRKYHVGIDVGTNSVGFAAVEVGDSGSPIRFLNTMVVIHDSGVDPEQKKYAITRLASAGTARRTRRLYRTRRQRLRELDDFISNELGYPLVNLENFADPYEPWKVRADLATIKLPADELPEAMSIALRHMARHRGWRSPYQRVEALHLHAEISEEFSALKKRVMEKTGDVFSDDATPAEVLVDLMGRQKIRGADGMLSGKLRQSDNANELRKIASVQGIDDETLNRIIDRVFFSRSPKGKASERVGMDALPGQGSKPRALKAMPSFQKFRIVSVICNLRIKDSGDDNRPLSMEEKEQLIGYLMSSTTDDHVTWTDVAELLHVKRSNLQGTAKEGPDGERPYTRPPVNSAWSKIKDSKIKSLVALWKTGDVDVQSAIVEALSNASVLEDARPGADIVVAYLESLDDKELESLDKVGLPAGRASYSEDSLERLTERMLQDDCDLFEARKREFGVSDDWKPPADPIYAPVGNPGVDRVLKIVNRLLMAAEREWGAPTQINIEHVRSGFSSELMQREFERENERRRAQNEEAVKAILTEKGGNSHVSKYDIIRYYAVKRQNCQCLYCGTPITFSDCELDHIVPRKGVGSTNSRVNLAAACRSCNRDKSNLPFAVWAGKTSNFDVSIDGAVSRVKQWQRSQNEGAREFRAFQNEVISRLLKTTEDPEIDSRSLESVAWMARELHHRVEYYFQSKGAQTQVSVYRGAVTAQARKSSGLEDKVKMIGGGGKTRLDRRHHAMDAATIALMTPGISTTLSEKNNLRDAQKFTGQSETWKDYCGRTETAREHFAVWKSNMERLTDLFNDKLENDAIPVVQPLRLRLSDSKAHDDGIGKLDSKKLGSVWSLADIDRAATPQIWTALTRCDDFDPTKGLPENANRVIRAQGVKYESEDNIPVFPSNVAAIAVRDGYAEIGSTIHHARIYRIDDGKKIFYSMIRVFAVDLLKHQAEDLFTVKLPPSAISIRTCEDSLRRALSNGTAEYLGWLVPGDEIIVDTSDKAFHTGQIGDLLRNFPVNSFRLTGFPSNSRLRLKPVLLAGEGLRDDAEDSIKKILSGQGWRPAINVLFSKGKPRIVRRNSLGIERPSSNNGLPFSWEA

SEQ ID NO: 190 - protein, 1054 aa, Staphylococcus lugdunensis
MNQKFILGLDIGITSVGYGLIDYETKNIIDAGVRLFPEANVENNEGRRSKRGSRRLKRRRIHRLERVKKLLEDYNLLDQSQIPQSTNPYAIRVKGLSEALSKDELVIALLHIAKRRGIHKIDVIDSNDDVGNELSTKEQLNKNSKLLKDKFVCQIQLERMNEGQVRGEKNRFKTADIIKEIIQLLNVQKNFHQLDENFINKYIELVEMRREYFEGPGKGSPYGWEGDPKAWYETLMGHCTYFPDELRSVKYAYSADLFNALNDLNNLVIQRDGLSKLEYHEKYHIIENVFKQKKKPTLKQIANEINVNPEDIKGYRITKSGKPQFTEFKLYHDLKSVLFDQSILENEDVLDQIAEILTIYQDKDSIKSKLTELDILLNEEDKENIAQLTGYTGTHRLSLKCIRLVLEEQWYSSRNQMEIFTHLNIKPKKINLTAANKIPKAMIDEFILSPVVKRTFGQAINLINKIIEKYGVPEDIIIELARENNSKDKQKFINEMQKKNENTRKRINEIIGKYGNQNAKRLVEKIRLHDEQEGKCLYSLESIPLEDLLNNPNHYEVDHIIPRSVSFDNSYHNKVLVKQSENSKKSNLTPYQYFNSGKSKLSYNQFKQHILNLSKSQDRISKKKKEYLLEERDINKFEVQKEFINRNLVDTRYATRELTNYLKAYFSANNMNVKVKTINGSFTDYLRKVWKFKKERNHGYKHHAEDALIIANADFLFKENKKLKAVNSVLEKPEIESKQLDIQVDSEDNYSEMFIIPKQVQDIKDFRNFKYSHRVDKKPNRQLINDTLYSTRKKDNSTYIVQTIKDIYAKDNTTLKKQFDKSPEKFLMYQHDPRTFEKLEVIMKQYANEKNPLAKYHEETGEYLTKYSKKNNGPIVKSLKYIGNKLGSHLDVTHQFKSSTKKLVKLSIKPYRFDVYLTDKGYKFITISYLDVLKKDNYYYIPEQKYDKLKLGKAIDKNAKFIASFYKNDLIKLDGEIYKIIGVNSDTRNMIELDLPDIRYKEYCELNNIKGEPRIKKTIGKKVNSIEKLTTDVLGNVFTNTQYTKPQLLFKRGN

SEQ ID NO: 191 - protein, 586 aa, Pseudoramibacter alactolyticus
MTYYLGLDMGTGSVGWAATDKNYKLIRAKGKDLWGVRLFQTAKTAAERRSHRVARLRRQREKVRIGYLKTIFSDAINKVDPGFFQRLDDSFFYAEDKNINQPYALFADTGYTDVDYYRDYPTIFHLRSTLIHDTSPKDVRLVYLAVLNMFKHRGHFLASNLSENGVDDFGDIYQQWCKSVPKPVQISDPEAKTEKIENILSKAGISNTRRLEALLEVFGIKRRDAFAEVLKLWCGLKGNLSKIWSETDFSDLDNTKPALSFKDSNLDMVLSQLEEILPDEDYSWLMLTKQIYDWSLLSGMMKDASGKSYDYLSDARVASYQKHSEDLKTLKRFYHDNHLSAAYDQMFRVMGKDNYSAYAGSVQSKKEVVRRGASCGIEELYKRIKKDLKPVPDCETKQIILENIERGTFLPKQLTRDNGVIPNQIHVHELKAILKNAENYLPFLKEGSELTNSEKILQLFQFQIPYYVGPLYSDENNYAWVVRKEGGRVFPWNFAEKVDEKASAEGFISELVARCTYLDNEKVLPKASLLYEKFMVLNELNNLRINGERISVDIKQELYQNLFTRGKKVTLKKSEGLFGGQRIFCL

SEQ ID NO: 192 - protein, 1385 aa, Gemella morbillorum
MKNKTWYLGLGVGPTSIGWAATDSNYKLLRKNKKRLWGVRLFEEAKTAVDRRTFRAERRRLARRKWRISLLEELFAKEVSKNDPNFFLRLKESKYHFEDKSLMNEYILFNDKDYTDKDYYKEYPTIYHLRLSLTTEENPDIRKVYLAVHSMLKNRGHFLLQGQSFNDSNIDSVIKELLELETVKINFEVTDEVIHSLKKIALEKKNLSDKNNDVKKLYPKEKQLQEIFKLVFGGKTSLDKLYDIEEYKELDNSVKSISFKEKVYEEVRPDYEQILSNYIELLDLAKLVYDSIVLADIKKEGKTISESKVELYNKHKDDLANLKKLVKIDSKLSEDKKKEVYFTIFKEDKEKGTNYVNYTHRSQEGKSCSYEDFKKFLKKELEKLEDSPTKTTILEELDLETFLPLQRTKDNSVVPYQIHKEELVKILDNAAKYHSFLAEKDDSGYSTREKVVQLFEFRIPYYIGPLNAHHNTENGGYSWAIRKKGMESVPVTPWNFKDVIDESASAEAFVNNLKNKCAYLSGEDVLPKNSLLYSEYALLNELNALRYEGNRISVEARDVIVTKLFKEQGKKVTKKTIKELLKTEGFIDGKGEIVGIDNIVKNDLKSYRDFKKILADKFDKERVENIILWITLYGESRKLIKEKITKVYGDFYTVDEIEKMSRLTYKDWGILSRKLLTELVSEKLYNEETGECLNIIGAMRQGTILFMELLADKFDYMSQIKNHNKENKDDITEITPDILENLHASPAVKRSIWQTVRIVEELKTIIGCVPTKIFIETTKRNNAPYKVPTLNRNDLVTKYKTIREHEIFELEKELKNTLDFTLNKNRLINEEPSKLKATKLYLYYTQLGRCMYTGKKIDLGELFDNNNKYDIDHIYPQSKVKDGSFNNIVLVTKASNDMKADVFPLKSKFQTKENKIFWRFLKEKKLITEEKYNRLVRTEEFSNGELTGFITRQLVETSQAIKVISNVLRELNPETTICYSKAENVSSFRQSFGKIKEANRKAENNEKLIRVQEINDYYNAKDAYLSIVVGNVYDVKFTRNVHNFIKNNKDARRYSLNGLFYTDVKNANTIAWEMDKTVHVVEKTMNNNNILITRRTSEQKGALYDATLYKAKVAEKAKEGTYYPLKTTDSKIKDVGKYGGFTKIKIAYYSIFEYTLDGKKGKQKITRIVPIPIYISQNIKDDKALLEYAQTRLPGKDLKIKYRKLCIGSLVKINNFNYYIGGKTNNNFTFDSAVQVILDKDSESYIKELAKYLNWKKENKDGKLWESITEDKNIQLYDSLVKKMNTGIFIRKTPNKYTELLTLEVKNKFINIDIDEQVKLLLEILNLLTNKKFTSKLNEIGITASRGVCSFNLSNQSQFSIIEQSVTGVYEKEKLIIEKKKEGIL

SEQ ID NO: 193 - protein, 1029 aa, Alicycliphilus denitrificans
MRSLRYRLALDLGSTSLGWALFRLDACNRPTAVIKAGVRIFSDGRNPKDGSSLAVTRRAARAMRRRRDRLLKRKTRMQAKLVEHGFFPADAGKRKALEQLNPYALRAKGLQEALLPGEFARALFHINQRRGFKSNRKTDKKDNDSGVLKKAIGQLRQQMAEQGSRTVGEYLWTRLQQGQGVRARYREKPYTTEEGKKRIDKSYDLYIDRAMIEQEFDALWAAQAAFNPTLFHEAARADLKDTLLHQRPLRPVKPGRCTLLPEEERAPLALPSTQRFRIHQEVNHLRLLDENLREVALTLAQRDAVVTALETKAKLSFEQIRKLLKLSGSVQFNLEDAKRTELKGNATSAALARKELFGAAWSGFDEALQDEIVWQLVTEEGEGALIAWLQTHTGVDEARAQAIVDVSLPEGYGNLSRKALARIVPALRAAVITYDKAVQAAGFDHHSQLGFEYDASEVEDLVHPETGEIRSVFKQLPYYGKALQRHVAFGSGKPEDPDEKRYGKIANPTVHIGLNQVRMVVNALIRRYGRPTEVVIELARDLKQSREQKVEAQRRQADNQRRNARIRRSIAEVLGIGEERVRGSDIQKWICWEELSFDAADRRCPYSGVQISAAMLLSDEVEVEHILPFSKTLDDSLNNRTVAMRQANRIKRNRTPWDARAEFEAQGWSYEDILQRAERMPLRKRYRFAPDGYERWLGDDKDFLARALNDTRYLSRVAAEYLRLVCPGTRVIPGQLTALLRGKFGLNDVLGLDGEKNRNDHRHHAVDACVIGVTDQGLMQRFATASAQARGDGLTRLVDGMPMPWPTYRDHVERAVRHIWVSHRPDHGFEGAMMEETSYGIRKDGSIKQRRKADGSAGREISNLIRIHEATQPLRHGVSADGQPLAYKGYVGGSNYCIEITVNDKGKWEGEVISTFRAYGVVRAGGMGRLRNPHEGQNGRKLIMRLVIGDSVRLEVDGAERTMRIVKISGSNGQIFMAPIHEANVDARNTDKQDAFTYTSKYAGSLQKAKTRRVTISPIGEVRDPGFKG

SEQ ID NO: 194 - protein, 1422 aa, Sutterella wadsworthensis
MTQSERRFSCSIGIDMGAKYTGVFYALFDREELPTNLNSKAMTLVMPETGPRYVQAQRTAVRHRLRGQKRYTLARKLAFLVVDDMIKKQEKRLTDEEWKRGREALSGLLKRRGYSRPNADGEDLTPLENVRADVFAAHPAFSTYFSEVRSLAEQWEEFTANISNVEKFLGDPNIPADKEFIEFAVAEGLIDKTEKKAYQSALSTLRANANVLTGLRQMGHKPRSEYFKAIEADLKKDSRLAKINEAFGGAERLARLLGNLSNLQLRAERWYFNAPDIMKDRGWEPDRFKKTLVRAFKFFHPAKDQNKQHLELIKQIENSEDIIETLCTLDPNRTIPPYEDQNNRRPPLDQTLLLSPEKLTRQYGEIWKTWSARLTSAEPTLAPAAEILERSTDRKSRVAVNGHEPLPTLAYQLSYALQRAFDRSKALDPYALRALAAGSKSNKLTSARTALENCIGGQNVKTFLDCARRYYREADDAKVGLWFDNADGLLERSDLHPPMKKKILPLLVANILQTDETTGQKFLDEIWRKQIKGRETVASRCARIETVRKSFGGGFNIAYNTAQYREVNKLPRNAQDKELLTIRDRVAETADFIAANLGLSDEQKRKFANPFSLAQFYTLIETEVSGFSATTLAVHLENAWRMTIKDAVINGETVRAAQCSRLPAETARPFDGLVRRLVDRQAWEIAKRVSTDIQSKVDFSNGIVDVSIFVEENKFEFSASVADLKKNKRVKDKMLSEAEKLETRWLIKNERIKKASRGTCPYTGDRLAEGGEIDHILPRSLIKDARGIVFNAEPNLIYASSRGNQLKKNQRYSLSDLKANYRNEIFKTSNIAAITAEIEDVVTKLQQTHRLKFFDLLNEHEQDCVRHALFLDDGSEARDAVLELLATQRRTRVNGTQIWMIKNLANKIREELQNWCKTTNNRLHFQAAATNVSDAKNLRLKLAQNQPDFEKPDIQPIASHSIDALCSFAVGSADAERDQNGFDYLDGKTVLGLYPQSCEVIHLQAKPQEEKSHFDSVAIFKEGIYAEQFLPIFTLNEKIWIGYETLNAKGERCGAIEVSGKQPKELLEMLAPFFNKPVGDLSAHATYRILKKPAYEFLAKAALQPLSAEEKRLAALLDALRYCTSRKSLMSLFMAANGKSLKKREDVLKPKLFQLKVELKGEKSFKLNGSLTLPVKQDWLRICDSPELADAFGKPCSADELTSKLARIWKRPVMRDLAHAPVRREFSLPAIDNPSGGFRIRRTNLFGNELYQVHAINAKKYRGFASAGSNVDWSKGILFNELQHENLTECGGRFITSADVTPMSEWRKVVAEDNLSIWIAPGTEGRRYVRVETTFIQASHWFEQSVENWAITSPLSLPASFKVDKPAEFQKAVGTELSELLGQPRSEIFIENVGNAKHIRFWYIVVSSNKKMNESYNNVSKS

SEQ ID NO: 195 - protein, 1132 aa, Nitratifractor salsuginis
MKKILGVDLGITSFGYAILQETGKDLYRCLDNSVVMRNNPYDEKSGESSQSIRSTQKSMRRLIEKRKKRIRCVAQTMERYGILDYSETMKINDPKNNPIKNRWQLRAVDAWKRPLSPQELFAIFAHMAKHRGYKSIATEDLIYELELELGLNDPEKESEKKADERRQVYNALRHLEELRKKYGGETIAQTIHRAVEAGDLRSYRNHDDYEKMIRREDIEEEIEKVLLRQAELGALGLPEEQVSELIDELKACITDQEMPTIDESLFGKCTFYKDELAAPAYSYLYDLYRLYKKLADLNIDGYEVTQEDREKVIEWVEKKIAQGKNLKKITHKDLRKILGLAPEQKIFGVEDERIVKGKKEPRTFVPFFFLADIAKFKELFASIQKHPDALQIFRELAEILQRSKTPQEALDRLRALMAGKGIDTDDRELLELFKNKRSGTRELSHRYILEALPLFLEGYDEKEVQRILGFDDREDYSRYPKSLRHLHLREGNLFEKEENPINNHAVKSLASWALGLIADLSWRYGPFDEIILETTRDALPEKIRKEIDKAMREREKALDKIIGKYKKEFPSIDKRLARKIQLWERQKGLDLYSGKVINLSQLLDGSADIEHIVPQSLGGLSTDYNTIVTLKSVNAAKGNRLPGDWLAGNPDYRERIGMLSEKGLIDWKKRKNLLAQSLDEIYTENTHSKGIRATSYLEALVAQVLKRYYPFPDPELRKNGIGVRMIPGKVTSKTRSLLGIKSKSRETNFHHAEDALILSTLTRGWQNRLHRMLRDNYGKSEAELKELWKKYMPHIEGLTLADYIDEAFRRFMSKGEESLFYRDMFDTIRSISYWVDKKPLSASSHKETVYSSRHEVPTLRKNILEAFDSLNVIKDRHKLTTEEFMKRYDKEIRQKLWLHRIGNTNDESYRAVEERATQIAQILTRYQLMDAQNDKEIDEKFQQALKELITSPIEVTGKLLRKMRFVYDKLNAMQIDRGLVETDKNMLGIHISKGPNEKLIFRRMDVNNAHELQKERSGILCYLNEMLFIFNKKGLIHYGCLRSYLEKGQGSKYIALFNPRFPANPKAQPSKFTSDSKIKQVGIGSATGIIKAHLDLDGHVRSYEVFGTLPEGSIEWFKEESGYGRVEDDPHH

SEQ ID NO: 196 - protein, 1327 aa, Solobacterium moorei
MEGQMKNNGNNLQQGNYYLGLDVGTSSVGWAVTDTDYNVLKFRGKSMWGARLFDEASTAEERRTHRGNRRRLARRKYRLLLLEQLFEKEIRKIDDNFFVRLHESNLWADDKSKPSKFLLFNDTNFTDKDYLKKYPTIYHLRSDLIHNSTEHDIRLVFLALHHLIKYRGHFIYDNSANGDVKTLDEAVSDFEEYLNENDIEFNIENKKEFINVLSDKHLTKKEKKISLKKLYGDITDSENINISVLIEMLSGSSISLSNLFKDIEFDGKQNLSLDSDIEETLNDVVDILGDNIDLLIHAKEVYDIAVLTSSLGKHKYLCDAKVELFEKNKKDLMILKKYIKKNHPEDYKKIFSSPTEKKNYAAYSQTNSKNVCSQEEFCLFIKPYIRDMVKSENEDEVRIAKEVEDKSFLTKLKGTNNSVVPYQIHERELNQILKNIVAYLPFMNDEQEDISVVDKIKLIFKFKIPYYVGPLNTKSTRSWVYRSDEKIYPWNFSNVIDLDKTAHEFMNRLIGRCTYTNDPVLPMDSLLYSKYNVLNEINPIKVNGKAIPVEVKQAIYTDLFENSKKKVTRKSIYIYLLKNGYIEKEDIVSGIDIEIKSKLKSHHDFTQIVQENKCTPEEIERIIKGILVYSDDKSMLRRWLKNNIKGLSENDVKYLAKLNYKEWGRLSKTLLTDIYTINPEDGEACSILDIMWNTNATLMEILSNEKYQFKQNIENYKAENYDEKQNLHEELDDMYISPAARRSIWQALRIVDEIVDIKKSAPKKIFIEMAREKKSAMKKKRTESRKDTLLELYKSCKSQADGFYDEELFEKLSNESNSRLRRDQLYLYYTQMGRSMYTGKRIDFDKLINDKNTYDIDHIYPRSKIKDDSITNRVLVEKDINGEKTDIYPISEDIRQKMQPFWKILKEKGLINEEKYKRLTRNYELTDEELSSFVARQLVETQQSTKALATLLKKEYPSAKIVYSKAGNVSEFRNRKDKELPKFREINDLHHAKDAYLNIVVGNVYDTKFTEKFFNNIRNENYSLKRVFDFSVPGAWDAKGSTFNTIKKYMAKNNPIIAFAPYEVKGELFDQQIVPKGKGQFPIKQGKDIEKYGGYNKLSSAFLFAVEYKGKKARERSLETVYIKDVELYLQDPIKYCESVLGLKEPQIIKPKILMGSLFSINNKKLVVTGRSGKQYVCHHIYQLSINDEDSQYLKNIAKYLQEEPDGNIERQNILNITSVNNIKLFDVLCTKFNSNTYEIILNSLKNDVNEGREKFSELDILEQCNILLQLLKAFKCNRESSNLEKLNNKKQAGVIVIPHLFTKCSVFKVIHQSITGLFEKEMDLLK

SEQ ID NO: 197 - protein, 738 aa, Treponema phagedenis
MLQELFAKEIAKIDEGFFRRLDESAFYLEDKSLKQKYSLFNDDNFTDKDYYKKFPTIHHLIKALINDETHVDIRLLYLACHTIIKNRGHFLFEGKEFNTESRFDDAINELFSYLRQDMEIDFAFEDKIADIKEILENKKIGMRDKQNALNKKLSIAPKDKQKKEIIKLIVGASFNLKTLFNDEKYSSEKESYSFAKSNYEEKEAVLESLLGDGFGLILRAKAVYDSSVLSEILGNETYLSFAKVKIYDKHKEDLAKLKKVIKTYHADEFKKVFAEANIQGNYCSYVGSCKKNGKKVPIEKRADKDAFYDFLKKILKDEKAKNSDADYAFILNEIELKTFLPKQVSKKNANIPYQLRRMELEKIVNNAEKYFSFLSEKDEYGTVKEKIIQLLTFKRPYYIGIIQDTHKEKFPDRCWVVKKENAKNEKITPWNFYDHIDEDKTAEAFITSRTNKCTYLIGEDVLPRNSLLYMEYTVLNELNNLKVSVDGVNIFDVKLKKKIYEQVFKQRKEVSKKTIADFLKKEGICKKENDVVITGIDEKCTTSLKLYIDIKKIIGKRIEEEPTKNALEDIILWASIYDEGEGRKILEAKIQSVYPDVFTQDELNKILKLKISGWGRFSRKFLESIVASFPGFTDTINIITAMRETNFNLMELLGDAYGFSKGIEKFNSKFNDDKKVFSYDKLVKDLYLSPSVKRMLWRALVIVKEVKSIMGKDPKKYLLKWQEEKKLKREGLPPAMQV

SEQ ID NO: 198 - protein, 1377 aa, Streptococcus equinus
MEKTYSIGLDIGTNSVGWAVITDDYKVPAKKMKVLGNTDKKYIKKNLLGALLFDSGETAEATRLKRAARRRYTRRKNRLRYLQEIFAKEMAKVDESFFQRLEESFLTDDDKTFDSHPIFGNKAEEDTYHQEFPTIYHLRKHLADSPEKVDLRLVYLALAHMIKFRGHFLIEGQLNAENTDVQKIFADFVGVYDRTFDDSHLSEITVDAASILTEKISKSRRLENLIKQYPTEKKNTLFGNLVALALGLQPNFKTNFKLSEDAKLQFSKDTYDEDLEELLGKIGDDYADLFTAAKNLYDAILLSGILTVDDNSTKAPLSASMIKRYEEHHEDLEKLKTFIKVNNFDKYHEIFKDKSKNGYAGYIENGVKQDIFYKHLKSIISEKNGGQYFLDKIEREDFLRKQRTFDNGSIPYQIHLQEMRTILRRQGEYYPFLKENQAKIEKILTFRIPYYVGPLARKNSRFAWAKYHSDEPITPWNFDEVVDKEKSAEKFITRMTLNDLYLPEEKVLPKHSYVYETFAVYNELTKIKYVNEQGKSFFFDANMKQEIFDHVFKENRKVTKAKLLSYLNNEFEEFRINDLIGLDKDSKSFNASLGTYHDLKKILDKSFLDDKTNEQIIEDIVLTLTLFEDRDMIHERLQKYSDIFTSQQLKKLERRHYTGWGRLSYKLINGIRNKENNKTILDFLIDDGDANRNFMQLINDDSLSFKTTIQEAQVVGDVDDIEAVVHDLPGSPAIKKGILQSVKIVDELVKVMGHNPQNIVIEMARENQITGYGRNRSNQRLKRLQDSLKEFGSDILSKKKPSYVDSKVENSHLQNDRLFLYYIQNGKDMYTGEELDIDHLSDYDIDHIIPQAFIKDNSIDNRVLTSSAKNRGKSDDVPSIEIVRNRKSYWYKLYKSGLISKRKFDNLTKAERGGLTETDKAGFIKRQLVETRQITKHVAQILDARFNTKCDENDKVIRDVKVITLKSSLVSQFRKEFKFYKVREINDYHHAHDAYLNAVVGTALLKKYPKLAPEFVYGEYKKYDVRKLVAKSSDNHSELGKATAKYFFYSNLMNFFKTEVKYADGRVFERPDIETNADGEVVWNKQRDFNIVRKVLSYPQVNIVKKVEVQTGGFSKESILPKGDSDKLIPRKTKKLQWETQKYGGFDSPTVAYSVLVVADVEKGKTRKLKTVKELVGISIMERSSFEENPVSFLEKKGYHNVQEDKLIKLPKYSLFEFEGGRRRLLASATELQKGNEVVLPQYMVNLLYHSQHVNNSHKPEHLNYVKQHKDEFKDIFNLIISIARINILKPKVVDNLINEFTEYGQEDISSLSESFINLLKFISFGAPGAFKFLKLDVKQSNLRYKSTTEALSATLIHQSVTGLYETRIDLSKLGEE

SEQ ID NO: 199 - protein, 1128 aa, Streptococcus vestibularis
MSDLVLGLDIGIGSVGVGILNKVTGEIIHKNSRIFPAAQAENNVERRTNRQGRRLTRRKKHRRVRLNHLFEESGLITDFTKVSINLNPYQLRVKGLIDELSNEELFIALKNMVKHRGISYLDDASDDGNSSVGDYAQIVKENSKQLETKTPGQIQLERYQKYGQLRGDFTVEEDGKKHRLINVFPTSAYRSEALRILQTQKEFNPQITDEFINRYLEILTGKRKYYHGPGNEKSRTDYGRYTTKKDSENEYITLDNIFGILIGKCTFYPEEYRAAKASYTAQEFNLLNDLNNLTVPTETKKLSEEQKNQIINYVKNEKAMGPAKLFKYIAKLLSCDVADIKGYRIDKSDKAEIHTFEAYRKMKTLETIDFEKMSRDQLDKLAYVLTLNTEREGIQEALDHEFADGNFSQEQIDELVQFRKANSSIFGKGWHNFSVKLMMELIPELYATSEEQMTILTRLGKQKTTSSSNKTKYIDEKLLTEEIYNPVVAKSVRQAIKIVNAAIKEYGDFDNIVIEMARETNEDDEKKAIQKIQKANKDEKDAAMLKAANQYNGRAELPHSVFHGHKQLATKIRLWHQQGERCLYTGKTISIHDLINNPNQFEIDHILPLSITFDDSLANKVLVYATANQEKGQRTPYQALDSMDDAWSFRELKAFVRESKSLSNKKKEYLLTEEDISRFDVRKKFIERNLVDTRYASRVVLNALQEHFRAHKTDTKVSVVRGQFTSQLRRHWGIEKTRDTYHHHAVDALIIAASSQLNLWKKQKNTLVNYSENQLLDIETGELISDDEYKESVFKAPYQHFVDTLKSKEFEDSILFSYQVDSKFNRKISDATIYATRQAKVGKDKKDETYVLGKIKDIYSQTGYDAFIKIYQKDKSKFLMYRHDPQTFEKVIEPILENYPNKEMNEKGKEVPCNPFLKYKEEHGDYIRKYSKKGNGPEIKSLKYYDSKLGNHIDITPKDSNNKVVLQSVSPWRADVYFNKTTGKYEILGLKYADLQFEKGTGTYKISQEKYNVIKKKEGVDSDSEFKFTLYKNDLLLIKDTETKEQQLFRFLSRTKPNVKHYVELKPYDKQKFEGNESLINVLGAVAKGGQCQKGINKPNISIYKVRTDVLGNQHIIKNEGDKPKLDF

SEQ ID NO: 200 - protein, 1080 aa, Methylocystis sp.
MRVLGLDGGIASIGWALIEIFEDHEPSDGRIIDTGAWMFDAPEEKSQTGTKLKSELRRIFRGQRRVIRRRRQRMNEVRRILHRHGLLSSDNRDALKQPGLDPWKIRAEGIDRLLSPIEFAVALGHIARHRGFKSNSKGAKTSDLDAESSRMKKAVGETREKLARFGSPAKLLVEDEGFVLRQTKLKSGALETVRRFRNRDGDYSRSLLRDDLAAEVRALFRAQARLQSTFAKVELEAEFTQAAFFQRPLQDSERLVGPCPFEPAEKRSPKRGYSFELFRFLSRLNHLTLREGSEERTLTVEELRTAAADFGGVAKFTFSTLRKRLALPDIAIFVGIKADDEKKLDVVARSGEAATGTARLRRVVIDALGELAWGALISAPERLDKITEIITFRSDLDRIRAGLIEAGFDTPLIEAIVRAAADGKLDAFTGVGHISAKAARNIIPGLMRGMTYDKACAAAGYDHTASRERDAFDVGMHGKEALKKILQEERISRELVGSPSARKALIEAVKQVKAIIEKYGVPDRIHVELARDVGKSIEERRDIHFGIEKRSRQKDKLRELFGKEVGHLPQDGERGKEELLRFELWNEQMGRCLYTDEYINPKQLVASDNSVQVDHILPWSRFGDDSYLNKTLCTAKANQDKKGRTPYEWFRADKPEAEWDAFVARVESIQFMKGLKKRNYKLKNAEEAAEKFRSRNLNDTRWTCRLLAEALKQLYPKGEKDKDGKERRRVFTRPGALTNRLRRAWSLQRRKKSEKGERIADDRHHALDAIIVAATTESLLIRATREVQDIERKGLHYDLTKNITQPWPGFADEALDAVEKVFVARAERRRARGKAHDATIRHIAVRDDEAKVYERKKVGDIKLGDLIRVKDAERNAPLIENLRKWIEAGSPRDNPPLSPKGDPVSKVRLVTKNKVNITLDTGNPERLATVDRGEMARVDVFRKANRKGKYEYYLVPIYPHEIATMETPPMRAVQGGGDDDKWPEIDSTFEFLWSINQLSLLELTKPDGEVIRSYFRSLDRNTGALTVSGIANSTATRKGIGTRTLIDFKKLHVDRLGQIFEVERELRTWRGETWRGKDCI

SEQ ID NO: 201 - protein, 1087 aa, Phascolarctobacterium succinatutens
MLRMKYAIGLDIGIASVGYAVLALDHEENPWGIIRLGSRIFDVAENPKDGASLALPRREARSVRRRLRRHHHRLERIKNLLINTEFITKDELLHLYDGNLSDVYELRVKALDYSVTNAELTRILLHLAQRRGFKSNRKSDANDKEAGQLLEAVSANAKRMQENHYRTVGEMFYKDDLFSKYKRNKGGTYLTTVHRDMIAAEARTILEKQFALGNNICTQDFIDKYLSILLSQRQFDEGPGEPSPYAGNQIANMIGKCTFEPNEYRAAKASYSFERFNLLQKVNHLRLLLEGKSIALDNEQRKKIIALAHDKADLRYSHIRKALGLDEKVLFNTITYNDDVSVIEKKTKFNFLQAYHQIKKVLAEDMQKLTTEQLDNIGQILSTYKSDNKRTEELSALGLEKKIIDALLGINGLSKFAHLSLKALRKINPYLEEGKIYNEACTAAGYDFKAHANTQKTELLPAYKEEMDDITSPVARRAIAQSIKVINAIIREQKGSPLYINIELAREMAKGFDERTQIDKANKENQAKNERIMERIRTEFHKANPTGMDLIKLKLWEEQDGRSPYSQKAISINRLFEPGYVDIDHIVPYSISFDDSFKNKVLVFSDENRDKGNRLPIAYLQSKFGAKAAENFMIWVQSNIKDYKKRQKLLKREITEEDINKFKERNLQDTKTISRFLYNYINDYLLFAPSDTGKKKRVTAVNGTITAYLRKRWGINKIRANGDKHHAVDAVVIACTTDKMIKDLSSFSRYHELEYTHTDTESFLVNSLTGEILKRFPYPWEDFRPELMARLSDNPADALRKLNLIFYHGIDLSTIKPIFVSRMPRHKVTGAAHKATIKSARCLDNGIVICKTSLQNLKLDKEGEIANYYAPESDTILYNALKERLRSYDNKPAKAFAEPFYKPKADGTPGPLVKKVKVYEKSTLNVAVQQNTAVADNDSMVRVDVFHVKGNGYYLVPIYIADTLKKELPNKAIVAYKPYADWPVMDDSNFIFSLYPNDLIKFEHKNSVKFAKVNKESTLNDFYSTKSEIVYFKGCNINTGAITIINHENTYVVSSLGVKTLPSLEKYQADVLGNYTKVKKEVRKPFR

SEQ ID NO: 202 - protein, 1375 aa, Lactobacillus ruminis
MRKNQEPYNIGLDIGTSSIGWSIMNDNFDLMRVKGKKGIGVRLYNEGQSAAERRMHRTARRRYGRRKWRLRLLEDFFDEHMAEVDDTFFARLKDSNISPKDDKKYRKSLLFPKSKGVTYQDDGEFYKKYPTMYHLRYALMTEHRKFDLREIYLAFHHMVKYRGNFLYDTSVDSFEAKNLDIKGKFDEINDLLSSYTDFYVDNSNAALVESILLEKNTTRKDKSKKIAKLLHVEDKEKGKNKKAKDLATQISNAVLGLKCNFHLIFELQQKYSFDLCSEKTEENIAKLSEVLDENQKMLLMILKEVQDQVMLNAFVPSGMSLSEAMMQKYDDYGEQLKIYHELEHSVSDDSAAKLRGAYRDYNDNIIKRIDGDNKKDTFYKRVKNILTKISKEYVDQDVLESCGKLKKLIDENKLFIRQRTAANGVLPHQLHQIEMRKIIDNQKEYYPWLAEPNPNEKRRVYSKYKVEELIAFRIPYYVGPLVDPNNADKNKEARFSWMVRKKDGEITPWNFYDKVDWAESANNFIERMKSKDTYLLGEDVVPKESMLYQKYEVLNELNNLRINDSGLSDSFEDVKLKQAIYNDLFKKQKIVKITDLQNYLVQNHKYLVKPKISGLADENRFLSSLSTYSDLKTIFGDKVDDRTYFNDFEKMVEYSTVFEDGHDYNQKLDEYTWLTKEEKYKIGKKRYRGWGKLSKKLLTGLRDKNNHTIMDNLWETNRNFMQIQTADEFSKQIAEENERHLKGSVSDAINDMYTSPANKKAIRQVLRVVDDIQKAMGYAPSSISLEFAREDGPSVRTVSRANRMKSIYEKYASEVSEEVMKDLDGVIKDKKGLNDRLYLYFEQQGKDMYSGHPLDFDKVISGQEYDIDHILPQAVIKDDSLDNRVLTTKALNNDVKSKGVPCRMFNGMHSFWKNLYDKGFISRRKFNNLTTNPENIDKYKMKGFVNRQLVETRQIIKLVANVLNDKYQNDDVDIIEVRAELTHDVRKHFKFYKNRNVNDYHHAFDAYLTSFIGHYLFKKYPNLRPLFDYNDFMKVSDNVFKQLRGNNFLGEFLNKTGDIISTDGNFVLNKEEMINKLNKAYAFKKILVTKEVGQRTGAMFNETRYPAPNSRKAALKYRRMPKPDSLISVKDYKNTDIYGGYSGKNDAYMVIVDMGKQYMVVGVPVRYTEKLDKLRIKHSELYRDELRKVLSRDKTLLDSKGNVKRFDIVLDRVLYGQLIEDGNELFTLGSSKYKRNFRQLFLDKQCIEILDSSATPQPTDEELIWVYDQILDKVDKYFELYDINRQRETLRKGRAAFCSLPNISMKKDDVTKKKILNEILVALHANESESNCEKIGKKVFGRLQVPGGIKLSKEAKLIYQSPTGLFERVVYLKDL

SEQ ID NO: 203 - protein, 1391 aa, Prevotella oralis
MKKILGLDLGTTSIGWALVNEKENNEELSSIIRLGVRVNPLTVDEKSNFEKGKDITTNADRTKCRSARRNLQRFKLRREALADCLKRHGLMTDETPLCETNNSIIFKTYSNRAKAVCEKIALDDFVRVLFMINKKRGYKSSRKLNTDDEGTLVDGMDVAKLLYNEQITPGEYLLRLFKKGKKTRPDFYLSDLKAELERIWDFQRTFYPEILCNALKEDLKGKSRTQSSAIFYAKYKVSTAKIAGKDKRLQELTWRTDALRKQLTIDEVAYVICSINGEVNGSSQRLSMISDRSKLLYFNHQTIGQYLMQRLEENPNAGLKNIIFYRQDYEDEFNDIWNSQATYHKELTPELKKEVKDIIFYQRGLKSCKWLINYCELEHEEIEVKTPEGKLRKITIGSKTCPKSSPLFQEFKIWQVLNNLQVSPLNSRRKAKRKKDEEPSLFSDEDMNTACRYLNEEEKLTLFKELSIKKELKKKDALKLLFENYKELDLNYKVISGNVTMANLYRAFQDIISLTGNGEFDFQAMPAEEAEKTVEEIFGGLGYKTAFLHFDASLHDKEFERQPAYRLWHLLYSYAGDQSKTGIEALVKRIQELCGFEPEYARILANISFIPDYGNLSSKAMRKILPYMQDGYEYSEACSKAGYRHSASSLTKEEINKKNYKTHLDEIKRNSLRNPIVEKILNQMVNVVNSVIDTYSNIDEIRIEMARELKKSKPEREDMSFAISKATKETERIKGILEQEFKIQHVTRNDIIRYRLYEELKPNGYKTLYSNTYIPREDLFSKKFDIEHIIPKARLFDDSYSNKTLELRDINIEKGNQTAYDFVLSKYGEEGLYKYEQRVEEFKKNNEQAGTKCRKLLMREADIPSDFLNRDLNDSQYIAKKAHELLREIVPTVTATTGSITNRLREDWKLVNVMKELNWEKYDKLGLTEEYKDKDGNTVRHIKDWTKRNDHRHHAMDALTIAFTKPSFIQYLNNLNARSNRGGSIYGIEQKELERENNKLVFIPPIDPKIFRKQAKEHLSNILISIKAKNKVVTKNVNKTKSKSGTNRKVQLTPRGQLHLETVYGKIRTYKTEEIKVGTKLTEELIAKVADKKIREALMQRLSEYGGNIKKAFQNISKHPIWLNGSHTKHVPEKVKIVFFEDVFTIRKAITPDIKIDKVIDSKIRRILQERLNEFGGEASKAFSNLDENPIWFNRDKGIAIKSVKIRGIAKGTAIRVKKDIHGKTIIGNNGYPVANDYVNTGNNHHVAIFRDKDGNLQEHIVSFYEATARAIQNLPIVDRNYNSEKDWKFLFSMKQNEYFVFPNPNTGFNPSEISLKDEKNYALISPNLFRVQKLSHYYYVFRHHLETNVDTNLQLKDITWKRITAVNNLTGAVKVRIDHLGRIVDVGEYK

SEQ ID NO: 204 - protein, 1167 aa, Streptococcus sanguinis
MLFGLKTKFKDCFELEEEPDLNFSKENYDDNLEKLLGELGEDFSDVFDKLKILRDTILLSGMLTYTGATHARFSATMVERYEEHRKDLQRFKSFIKQNLSEQDYLDIFGRKTQNGFDVDKETKGYVGYITNKMVLTNPQKQKTIQQNFYDYISGKITGIEGSEYFLNKISDRTFLRKLRTSDNGAIPNQIHAYELEKIIERQGKDYPFLLENKDKLLSILTFKIPYYVGPLAKGNNSRFAWIKRANSSDILDDNDEDTRNGKIRPWNYHKLINMDETRDAFITNLIGNDTILLNEKVLPKRSLIYEEVMLQNELTRVKYKDKYGKAHFFDSEHRQNIINGLFKINSKRVNAERLIKYLSDNHKDLNAIEIVSGVEKGKSFNSTLKTYNDFKTIFSEEFLDSEIYQKELEEIIKVITVFDDKKSIKNYLTKYFGHLEFLDEEKINQLSKLRYTGWGRYSAKLLLDIRDEDTGFNLLQFLRNDEENRNLTNLISDNTLSFDPKIKAIQSKSTVEDDVFDEIKKLAGSPAIKRGILNSIKIVDELVQIIGYPPQNIVIEMARENMTTEEGQKKTKTRKSKLESALKNIENSVLENGKVLHSDEQLQSEKLYLYYLQNGKDIYSLDETGSPAPIYLDQLDQYEVDHIIPYSFLPIDSIDNKVLTHRKNNQRKLDNIPDKETVAHMKPFWEALYNAKLISQTKYQRLTTSERTPDGVLTESMKAGFIERQLVETRQIIKHVARILDNRFSDTKIITLKSQLVTNFRNTFHIAKIRELNDYHHAHDAYLAVVVGQTLLKAYPKLAPELIYGHHVHFNRHEENKATLRKHLYSNIMRFFNNPDSKVSKDIWDCNRDLPIIKHVIYNSQINFVKRTMIKKGAFYNQNPVGKFNKQLAANNRYPLKTKALCLDTSIYGGYGPMNSTLSIIIIAERFNEKKGKIETVKEFHDIFIIDYEKFNNNPFQFLNDTSENGFLKKNNINRVLGFYRIPKYSLMQKIDGTRMLFESKLNLHKATQFKLTKTQNELFFHMKRLLTNSNLMDLKSESAIKESQNFILKHKEEFDNISNQLSAFSQKMLGNTTSLKNLIKGYNERKIKEIDIREETIKYFYDNFIKMFSFVKSGAPKDINDFFDNKYTVARMRPKPDKRLLNATLIHQSITGLYETRIDLSKLGED

SEQ ID NO: 205 - protein, 1334 aa, Staphylococcus pseudintermedius
MGRKPYILSLDIGTGSVGYACMDKGFNVLKYHDKDALGVYLFDGALTAQERRQFRTSRRRKNRRIKRLGLLQELLAPLVQNPNFYQFQRQFAWKNDNMDFKNKSLSEVLSFLGYESKKYPTIYHLQEALLLKDEKFDPELIYMALYHLVKYRGHFLFDHLKIENLTNNDNMHDFVELIETYENLNNIKLNLDYEKTKVIYEILKDNEMTKNDRAKRVKNMEKKLEQFSIMLLGLKFNEGKLFNHADNAEELKGANQSHTFADNYEENLTPFLTVEQSEFIERANKIYLSLTLQDILKGKKSMAMSKVAAYDKFRNELKQVKDIVYKADSTRTQFKKIFVSSKKSLKQYDATPNDQTFSSLCLFDQYLIRPKKQYSLLIKELKKIIPQDSELYFEAENDTLLKVLNTTDNASIPMQINLYEAETILRNQQKYHAEITDEMIEKVLSLIQFRIPYYVGPLVNDHTASKFGWMERKSNESIKPWNFDEVVDRSKSATQFIRRMTNKCSYLINEDVLPKNSLLYQEMEVLNELNATQIRLQTDPKNRKYRMMPQIKLFAVEHIFKKYKTVSHSKFLEIMLNSNHRENFMNHGEKLSIFGTQDDKKFASKLSSYQDMTKIFGDIEGKRAQIEEIIQWITIFEDKKILVQKLKECYPELTSKQINQLKKLNYSGWGRLSEKLLTHAYQGHSIIELLRHSDENFMEILTNDVYGFQNFIKEENQVQSNKIQHQDIANLTTSPALKKGIWSTIKLVRELTSIFGEPEKIIMEFATEDQQKGKKQKSRKQLWDDNIKKNKLKSVDEYKYIIDVANKLNNEQLQQEKLWLYLSQNGKCMYSGQSIDLDALLSPNATKHYEVDHIFPRSFIKDDSIDNKVLVIKKMNQTKGDQVPLQFIQQPYERIAYWKSLNKAGLISDSKLHKLMKPEFTAMDKEGFIQRQLVETRQISVHVRDFLKEEYPNTKVIPMKAKMVSEFRKKFDIPKIRQMNDAHHAIDAYLNGVVYHGAQLAYPNVDLFDFNFKWEKVREKWKALGEFNTKQKSRELFFFKKLEKMEVSQGERLISKIKLDMNHFKINYSRKLANIPQQFYNQTAVSPKTAELKYESNKSNEVVYKGLTPYQTYVVAIKSVNKKGKEKMEYQMIDHYVFDFYKFQNGNEKELALYLAQRENKDEVLDAQIVYSLNKGDLLYINNHPCYFVSRKEVINAKQFELTVEQQLSLYNVMNNKETNVEKLLIEYDFIAEKVINEYHHYLNSKLKEKRVRTFFSESNQTHEDFIKALDELFKVVTASATRSDKIGSRKNSMTHRAFLGKGKDVKIAYTSISGLKTTKPKSLFKLAESRNEL

SEQ ID NO: 206 - protein, 1156 aa, Ruminococcus albus
MGNYYLGLDVGIGSIGWAVINIEKKRIEDFNVRIFKSGEIQEKNRNSRASQQCRRSRGLRRLYRRKSHRKLRLKNYLSIIGLTTSEKIDYYYETADNNVIQLRNKGLSEKLTPEEIAACLIHICNNRGYKDFYEVNVEDIEDPDERNEYKEEHDSIVLISNLMNEGGYCTPAEMICNCREFDEPNSVYRKFHNSAASKNHYLITRHMLVKEVDLILENQSKYYGILDDKTIAKIKDIIFAQRDFEIGPGKNERFRRFTGYLDSIGKCQFFKDQERGSRFTVIADIYAFVNVLSQYTYTNNRGESVFDTSFANDLINSALKNGSMDKRELKAIAKSYHIDISDKNSDTSLTKCFKYIKVVKPLFEKYGYDWDKLIENYTDTDNNVLNRIGIVLSQAQTPKRRREKLKALNIGLDDGLINELTKLKLSGTANVSYKYMQGSIEAFCEGDLYGKYQAKFNKEIPDIDENAKPQKLPPFKNEDDCEFFKNPVVFRSINETRKLINAIIDKYGYPAAVNIETADELNKTFEDRAIDTKRNNDNQKENDRIVKEIIECIKCDEVHARHLIEKYKLWEAQEGKCLYSGETITKEDMLRDKDKLFEVDHIVPYSLILDNTINNKALVYAEENQKKGQRTPLMYMNEAQAADYRVRVNTMFKSKKCSKKKYQYLMLPDLNDQELLGGWRSRNLNDTRYICKYLVNYLRKNLRFDRSYESSDEDDLKIRDHYRVFPVKSRFTSMFRRWWLNEKTWGRYDKAELKKLTYLDHAADAIIIANCRPEYVVLAGEKLKLNKMYHQAGKRITPEYEQSKKACIDNLYKLFRMDRRTAEKLLSGHGRLTPIIPNLSEEVDKRLWDKNIYEQFWKDDKDKKSCEELYRENVASLYKGDPKFASSLSMPVISLKPDHKYRGTITGEEAIRVKEIDGKLIKLKRKSISEITAESINSIYTDDKILIDSLKTIFEQADYKDVGDYLKKTNQHFFTTSSGKRVNKVTVIEKVPSRWLRKEIDDNNFSLLNDSSYYCIELYKDSKGDNNLQGIAMSDIVHDRKTKKLYLKPDFNYPDDYYTHVMYIFPGDYLRIKSTSKKSGEQLKFEGYFISVKNVNENSFRFISDNKPCAKDKRVSITKKDIVIKLAVDLMGKVQGENNGKGISCGEPLSLLKEKN

SEQ ID NO: 207 - protein, 1440 aa, Weeksella virosa
MKTILGLDLGTNSIGWALVEQDFENKQGLILGMGSRIIPMDAGIIGKFAEGSSISQTAERTGYRSIRRLRERHLLRRERLHRVLNILKFLPEHYAAEIDFEKRFGQFLAETEPKLAWKKNAEGKFEFLFQRSFDEMVADFKANGQDIKIPYDWTIYYLRKKALTQKISPQELAWIILNFNQKRGYYQLRGEEEEENPNKKVEFYSLKIVDVVADEQPNKKGDTWYSLHLENGWVYRRSSKIPLYDWKDKVRDFIVTTDINEDGSEKLDKDGEVKRSFRAPKEDDWTLIKKKTEQEIEQFNQTVGSYIYEALLDNPTQKIRGKLVRTIERKFYKSELKKILEKQIELQPELFTEDLYNACARELYRRNVAHQQQLSSRDFVYLFLNDIIFYQRPLRSQKSLISNCSLEFRTIKDKDGNGQIIYLKAIPKSNPYYQEFRVWQWLYNLKIFTKEDDKDVTNQFINKVEDLEALFEFLMNQKEVNHTDILTYLIEPIVKSKYPNAKGKAFKDELKKELKKYRWNYVYDADKDESKSYPMNETRYELRKRLDKVENVPADFMTRKIEQHLWHIIYSVTDKIEFEKALKSFANKYDLHQESFVENFKRFKPFDSDYGTYSEKAIKKLLPLMRVGKYWSWDIIDDKTKTRIGKIITGEYDETIKNRVREKAIDLTEENHFQGLQLWLAQYIVYDRHSEADIAGKWNSVADLEQYLSEFKQHSLRNPIVEQVITETLRVVRDIWKQYGKGAKDYFDEIHIELGREMKNTAEERKRLSSIISENETTNLRIRAILEELMYDENMENVRPYSPMQQEALKIYEDGVLSSSVEIPEDIEKISKKSEPTKSEIQRYKLWLEQKYRSPYTGRPIPLSKLFTPAYQIEHIIPQARFFDDGFSNKVICESEVNALKDKMLGLEFIQNYYGQKVTTSFGEVTILTEDAYKAFVKEHYDKNRSKRNKLLLEEIPEKMIDRQMNDTRYISKYISKVLSNLVRGEKDDEGVNSKNIIPGNGKITGILKQDWGLNDVWNDLILPRFERMNQLTNSTDFTAWNEKHQKFLPSVPLELSKGFQKKRIDHRHHALDALIIACATRDHVNLLNNKHAKSRNERYDLQHKLRHTTPWQDKEGKVRTKFTEFKKPWETFTQDTKKELEKIVVNFKQNLRVINKATNYYEKIVDGKKVMFKQEGVNWAIRKPMHKETVSGKIDLPRVKVSKGKILTATRKSLDTSFNAKTILSITDTGIQKILLNYLKAKGNPELAFSPEGIEEMNQNISLYNDGKPHQPILKVRVFEQGSKFPLGETGNKTTKYVEAAKGTNLFFGVYEDNQGKRSYDTIPLNIVIERQKQGLNSVPETNEKGHRLLFSLSPNDLVYVPIEGEVFDETNPDVNRIYKVVSFSGSQMFCVRQDVATSIVYKLEFSSLNKMERTIDGIMIKEICIKLKVDRLGNISKA

SEQ ID NO: 208 - protein, 1179 aa, Sphaerochaeta globus
MSKKVSRRYEEQAQEICQRLGSRPYSIGLDLGVGSIGVAVAAYDPIKKQPSDLVFVSSRIFIPSTGAAERRQKRGQRNSLRHRANRLKFLWKLLAERNLMLSYSEQDVPDPARLRFEDAVVRANPYELRLKGLNEQLTLSELGYALYHIANHRGSSSVRTFLDEEKSSDDKKLEEQQAMTEQLAKEKGISTFIEVLTAFNTNGLIGYRNSESVKSKGVPVPTRDIISNEIDVLLQTQKQFYQEILSDEYCDRIVSAILFENEKIVPEAGCCPYFPDEKKLPRCHFLNEERRLWEAINNARIKMPMQEGAAKRYQSASFSDEQRHILFHIARSGTDITPKLVQKEFPALKTSIIVLQGKEKAIQKIAGFRFRRLEEKSFWKRLSEEQKDDFFSAWTNTPDDKRLSKYLMKHLLLTENEVVDALKTVSLIGDYGPIGKTATQLLMKHLEDGLTYTEALERGMETGEFQELSVWEQQSLLPYYGQILTGSTQALMGKYWHSAFKEKRDSEGFFKPNTNSDEEKYGRIANPVVHQTLNELRKLMNELITILGAKPQEITVELARELKVGAEKREDIIKQQTKQEKEAVLAYSKYCEPNNLDKRYIERFRLLEDQAFVCPYCLEHISVADIAAGRADVDHIFPRDDTADNSYGNKVVAHRQCNDIKGKRTPYAAFSNTSAWGPIMHYLDETPGMWRKRRKFETNEEEYAKYLQSKGFVSRFESDNSYIAKAAKEYLRCLFNPNNVTAVGSLKGMETSILRKAWNLQGIDDLLGSRHWSKDADTSPTMRKNRDDNRHHGLDAIVALYCSRSLVQMINTMSEQGKRAVEIEAMIPIPGYASEPNLSFEAQRELFRKKILEFMDLHAFVSMKTDNDANGALLKDTVYSILGADTQGEDLVFVVKKKIKDIGVKIGDYEEVASAIRGRITDKQPKWYPMEMKDKIEQLQSKNEAALQKYKESLVQAAAVLEESNRKLIESGKKPIQLSEKTISKKALELVGGYYYLISNNKRTKTFVVKEPSNEVKGFAFDTGSNLCLDFYHDAQGKLCGEIIRKIQAMNPSYKPAYMKQGYSLYVRLYQGDVCELRASDLTEAESNLAKTTHVRLPNAKPGRTFVIIITFTEMGSGYQIYFSNLAKSKKGQDTSFTLTTIKNYDVRKVQLSSAGLVRYVSPLLVDKIEKDEVALCGE

SEQ ID NO: 209 - protein, 1370 aa, Streptococcus gallolyticus
MTKKNYSIGLDIGTNSVGWAVITDDYKVPAKKMKVLGNTDKKYIKKNLLGALLFDSGETAEATRLKRTARRRYTRRKNRLRYLQEIFAEEMTKVDESFFYRLDESFLTTDEKDFERHPIFGNKAEEDAYHQKFPTIYHLRNYLADSSEKADLRLVYLALAHMIKYRGHFLIEGKLNAENTDVQKLFTDFVGVYDRTFDDSHLSEITVDVASTLTEKISKSRRLENLIKYYPTEKKNTLFGNLIALALGLQPNFKMNFKLSEDAKLQFSKDTYEEDLEELLGKIGDDYADLFTSAKNLYDAILLSGILTVDDNSTKAPLSASMIKRYVEHHEDLEKLKEFIKANKSELYHDIFKDKNKNGYAGYIENGVKQDEFYKYLKNTLSKIDGSDYFLDKIEREDFLRKQRTFDNGSIPHQIHLQEMHAILRRQGDYYPFLKEKQDRIEKILTFRIPYYVGPLVRKDSRFAWAEYRSDEKITPWNFDKVIDKEKSAEKFITRMTLNDLYLPEEKVLPKHSHVYETYAVYNELTKIKYVNEQGKESFFDSNMKQEIFDHVFKENRKVTKEKLLNYLNKEFPEYRIKDLIGLDKENKSFNASLGTYHDLKKILDKAFLDDKVNEEVIEDIIKTLTLFEDKDMIHERLQKYSDIFTANQLKKLERRHYTGWGRLSYKLINGIRNKENNKTILDYLIDDGSANRNFMQLINDDTLPFKQIIQKSQVVGDVDDIEAVVHDLPGSPAIKKGILQSVKIVDELVKVMGDNPDNIVIEMARENQTTNRGRSQSQQRLKKLQSSLKELGSNILNEEKPSYIEDKVENSHLQNDQLFLYYIQNGKDMYTGDELDIDHLSDYDIDHIIPQAFIKDDSIDNRVLTSSAKNRGKSDDVPSLDIVRARKAEWVRLYKSGLISKRKFDNLTKAERGGLTEADKAGFIKRQLVETRQITKHVAQILDARFNTEHDENDKVIRDVKVITLKSNLVSQFRKDFEFYKVREINDYHHAHDAYLNAVVGTALLKKYPKLASEFVYGEYKKYDIRKFITNSSDKATAKYFFYSNLMNFFKTKVKYADGTVFERPIIETNADGEIAWNKQIDFEKVRKVLSYPQVNIVKKVETQTGGFSKESILPKGDSDKLIPRKTKKVYWDTKKYGGFDSPTVAYSVFVVADVEKGKAKKLKTVKELVGISIMERSFFEENPVEFLENKGYHNIREDKLIKLPKYSLFEFEGGRRRLLASASELQKGNEMVLPGYLVELLYHAHRADNFNSTEYLNYVSEHKKEFEKVLSCVEDFANLYVDVEKNLSKIRAVADSMDNFSIEEISNSFINLLTLTALGAPADFNFLGEKIPRKRYTSTKECLTATLIHQSITGLYETRIDLSKLGEE

SEQ ID NO: 210 - protein, 1044 aa, Nitrosomonas sp.
MLHKMRYRLALDLGSTSLGWAMVRLNANQQPCAVIKAGVRIFSNGRNPKDGSSLAVTRREARSMRRRRDRLLKRKARMMRTLIEYGFFPANETQRKALENLNPYALRAKGLDEALTPSEFARALFHINQRRGFKSNRKTDKKDSDSGALKTAIKQLHSVLDPQGNDGKPRTVGELLYKRFTDLSKLPKDRTVRARYRQDKIVKDDGKTKIDKYYDLYIDRAMIEQEFDALWKKQSELNPILFTENARADLKDVLLYQRSLKPVKPGRCTFMSEEERAPLALPSTQRFRMYQEVNNLRILREGLKEESLTLQQRDDLINALEKNNRRTFTQIKKLLGVGGSVQFNFEDPKREELKGNTTSAILGKSEHFGEAWFAFNEAKQDAIVLQLIKEENEAKLVRWLQDETGIDEKRAEVIANAGLPEGYGSLCIEALARILPELRRDVVTYDKAVQAAGFEHHSKLNRNEEIPDITFKIESIDRNSGEIKQFHLHKELPYYGEYLQRHVGFGSGKPEDSIEKRYGKIANPTVHIGLNQVRVVVNALIKRYGHPSEIIVEVARDLKQSKDRRDEENKRQAENQKRNERLRKDIADILGISEERVRRDDIEKMILWEELSFDPADRRCPYSGVQVSTVMLLSDEVEVEHILPFSQTLDDSLNNKTVALRQANRIKGNRTPWEAFGTSNISGFDYSGILTRAELMPKAKRYRFAEDGYQRWLKDDAGFLARALNDTRHLSKIAREYMSLICPNTRVIPGQMTAMLRRNFGLNDVLGLNGEKNRNDHRHHAVDACVIAVTDQGLLQRFAAASASARERQLNRLVENMPLPWESYREHVRRAIDGIWVSHRPDHSHEGAMHNDTAYGLRGNGRVSFHKMVEGKREYIEDNLKVIEITDTKAIDRHGLLPTGKPRPYKGYKGDSNYCIEIVRNEKGRWEGEIISTFDAYQLVRKYGIVQLRYPVLSVSGKPLVMRLIRNDFVRLEHEGITRTLRVCKMREDGQVALADVTEANVDARTRTKEICYVFKTGGSLQKAKARRITISPIGELRDPGFKE

SEQ ID NO: 211 - protein, 1045 aa, Acidovorax avenae
MQKEKPLAYRLALDLGSTSLGWAVLRLSAPGEPSAVIRAGSRIFSDGRNPKDGSSLAVTRRAARAMRRRRDRLLKRKARMLAALERHGFFPQDEAARKALEKLNPYGLRARGLESALKPEEFGRALFHLNQRRGFQSNRKTDRKDSDSGALKQAIGTLRAQMHESGCRTVGEWFWKVRMERKPEGVKGQGVRARYRETPFTTDEGKKRIDKRYDLYVDRAMVAQEFDALWAAQATFAPALFNEAARAELRDILLHQRKLRPVQPGRCTLVPEEPRALLALPSTQRFRIYQEVNHLRVLHDELREEALTLAQRDQIVALLERQAKVTFTAMRKALGFSALFNLEDAKRDGLKGNATTAALGKKDLFGPLWAGFDTALQDEIVTQLMTEESEPRLIAWLQEHTGVDEARAQAIANAGLPEGYGSLGRTALARIVPELQRDVITYDKAVQAAGFAHHSDLGFSFEHDADEVERIGERTIASTGEIKPVFAFKQLPYYGRALQRHVAFAKENPRNDEERYGKIANPTVHIGLNQVRVVVNALMCRYGRPTEVVIELARDLKQSREQKLEAQQRQADNQKRNARIRRSIAEVLGISEERVRTLDIQKWILWEELSHDAADRRCPYSGVQISASMLLGERVEIEHILPFSMTLDDSLNNRTVALREANRIKRNRTPWDARTDFEAHGWSYDGILQRAERMPQRKRHRFAPDGYERWLGEDKDFLARALNDTRYLSRVAAEYLRLVCPGSATRVIPGQMTALLRGKFGLNDVLGLDGEKNRNDHRHHAVDACVIGVTDQRMMQRFAQANAQAREDGLTRLVEDMPLPWPTYRAHVERAVRHIWVSHKPDHGFEGAMMEETSYGILRDGTIKQRRKADGSAGREISRLIRITEPSQPQRHGVDAEGRPLPYKGYVGGSNYCLEITVNDKGKWEGQVISTFDAYRIVREGGLRQLRHSTQGQNGQALAMRLVIGDSVRLEVDEQERVMRIVKINGNNGQVFMAPVHEANVDARNSDKNEAFAYTSKIAGSFQKTKARQVTISPIGELRDPGFKG

SEQ ID NO: 212 - protein, 1218 aa, Prevotella denticola
MKASEEKLSKGLSTYMKENNLLTVGAAFAQLEDEGVRIRNNNNYRAIRSQFQHEIETIFMFQQGLSENELYERLVSEKKNIGTIFYKRPLRSQRGNVGKCTLERTKPRCAIGHPLFEKFRAWTLINNIKIRMSEEEQAEQLPMKLRFELYNDCFLAFVRAEFKFEDIRKYLEKRLGVHFSYNDKTINYKDSTSVAGCPITARFRKLLGEDWESFHVDGQKQRQAHGKNNASFHTVSYSTNDIWHFCYDAEEPEAVLSFAQDNLKWEKKKAEELVRIWSAIPQGYAMLSQKAIRNINKMLILGLKYSDAVLLAKVPEIVEITDGEILSVTEDYHRVEAQVGYEKQINNIVNALIAKYKSASEEYRFADHNYEYQLDKSDEKDIIKQIESNIGTRKWSLLDADEQTDILQKVRDKYQNFFRSHERKFVESPKLGECFEEYLMKKFPMVEGEQWKKLYHPSQIAIYRPVSAGKDRSALRLGNPDIGAIKNPTVLRVLNTLRKRVNQLLDDGLISPDETRVVVETARELNDANRKWALDNYNRIRHDENEKIKKILEEFYPKRDGISTDDIDKARYVIDQREMDYFTEEKPYNKDIKKYKLWLEQGGQCMYTGRTINLSNLFDPNSFDVEHTIPESISFDSSDMNLTLCDAHYNRFIKKNHIPADLPNYDKSVVIDGKEYSPIKPRLQRWADRVERLNRNVEYWRGQARRAQNKDRKDQCMREMHLWKMELEYWTKKLERFTITEVTDEFKNSQLVDTRVITRHAVLYLKSIFPHVDVQRGDVTAKFRKILGIQSVDEKKDRSLHSHHAIDATTLTIIPGAAKRERMLELFAKIEEVNKMLSFSGNEDRTGLKQELDGLKNQLNKEVKACRIGHNVSEIGTFINDNIIINHHVKNQALTPVRRRLRKRGHIVGGMDNPRWQTGDALRGEIHKASYYGAITQFAKDKDGKVLLKEGHPLVDPTIKFVIRRELKYKKSTADSGFASWDDLEKAIVDKELFALMKGQFPEETSFKDACEQGIYMIKKGKNGEVDTKLYRIRHIRCKTKQKNALKIKEQAYKSEKEYKRYFYAAVGDLYAMCCYTNGKTREFKIYSLYDISCHRKVGVEDIPEFITDKKGNRLMLDYKLHTGDMILLYKENPEELYDLDNVSLSKLLYKINGFENDGLRIRMVNHLVAKEAMGESVKDYAKLPDIIRCGVKTIKFLVMGENRDFVIKNGKISFNHR

SEQ ID NO: 213 - protein, 1458 aa, Fluviicola taffensis
MTKTILGLDLGTNSIGWALINQDFDNKKGEILGMGSRIIPMTQDIKDEFGKGNSISQTAERTRLRGVRRLIHRTLLRRERLHRVLNIIGFLPEHYANQIDFEKRFGKFKPESEPKISFDGNDVFLFEKSYQEMLVDFKIHQPQLVSNGKKIPHDWTIYYLRKKALSKKIEKEELAWILLNFNQKRGYYQLRGEEEEETPNKLVEFHSLKIVEVNADEPQKGKPEIWYSLVLENGWVYRRASKTPLFDWKDKIREFIVTTEINNDGTVKTDKEGTEKRSFRAPKPEDWTLQKKKTEFELSKSGNEVGAFIYESILQKPNQKIRGKLISTIERKFYKEELKTILKTQLFFHKELKDEKLYNACIEELYKNNEAHRSLLSNKGFEHLFINDILFYQRPLRSKKSQISNCPLEKRTYKKEGIEITEGIKVISKSNPIYQEFRLWQWISNLSLYCIEPTETNVTSTFLNSIEDYENLFEFLNNRKEIEQKHLLKYLLENQGFKGKLLTNELEKFRWNFVADKKYPCNETGSLLHTRLSKVKNISPDFLTKEIEHQLWHIIYSVTDKIEYEQALKTFARKNNLDVDSFFEHFKKIPPFESTYGAYSEKAIKKLLPLIRLGKYWNWEAIDSISKDRISKILSGEYDENIKNRVREKAVHLTSENNFQGLQEWLAKYIVYDRHSEGNDLGKWTSVSDLETYLKEFKQHSLRNPIVEQVITETLRVVKDIWIKHGKGTENFFDEIHVELGREMKNNSEDRKRLTNTITENENTNLRIKALLMEMMNDNDVENVRPYSPSQQEILKIYEDGALNSNIELDDEIVKISKKAEPTKSELQRYKLWLEQKYRSPYTGQVIPLNKLFTSEYEIEHVVPQSRFFDDSFSNKVICESAVNKRKDNQLGLQFIKNHSGEKVELGFGKVVQVFTEEQYLDFVKEHYSKNRSKHNKLLLEEIPEKMIERQLNDTRYISKFVSSILSNIVRSEKDDDGLNSKNILPGNGKITTELKRDWGLNDVWNDLILPRFERMNTITNSDLFTTYNDKYQKHLPTVPFEYSKGFQKKRIDHRHHAMDALVIACATRDHLNLMNNQSAKSELKRYDLQNKLRKKEPYFNQKENKQKEAFKDFIKPWGTFTEDSKNALEKIIISFKQNLRVINKATNSYESYKDEDGNLRIGKDGKPEKGLIKQKGLNWAIRKPLHKDTVSGQINLSRIKLPNGKILTATRKNLDTSFDLKTIENSITDTGIQKILKNYLLSKESPELAFSPEGLEEMNNEIEKYNNGKFHHPINKARIYELGSKFNVGQTGNRRDKFVEAAKGTNLFFAIYQDENKNRSYETIPLNEVIEHQKWRASLPKEEQEKIPLVPVNKLKGTFIFSLSPNDLVYVPSNDELERSASIDFSKLKKEQINRLYKMVSSSGSQCFFVKSEVATSVVNKMEYSSLNKMEKSIDNLMVKEICIKLKIDRLGNISKA

SEQ ID NO: 214 - protein, 1384 aa, Coriobacterium glomerans
MKLRGIEDDYSIGLDMGTSSVGWAVTDERGTLAHFKRKPTWGSRLFREAQTAAVARMPRGQRRRYVRRRWRLDLLQKLFEQQMEQADPDFFIRLRQSRLLRDDRAEEHADYRWPLFNDCKFTERDYYQRFPTIYHVRSWLMETDEQADIRLIYLALHNIVKHRGNFLREGQSLSAKSARPDEALNHLRETLRVWSSERGFECSIADNGSILAMLTHPDLSPSDRRKKIAPLFDVKSDDAAADKKLGIALAGAVIGLKTEFKNIFGDFPCEDSSIYLSNDEAVDAVRSACPDDCAELFDRLCEVYSAYVLQGLLSYAPGQTISANMVEKYRRYGEDLALLKKLVKIYAPDQYRMFFSGATYPGTGIYDAAQARGYTKYNLGPKKSEYKPSESMQYDDFRKAVEKLFAKTDARADERYRMMMDRFDKQQFLRRLKTSDNGSIYHQLHLEELKAIVENQGRFYPFLKRDADKLVSLVSFRIPYYVGPLSTRNARTDQHGENRFAWSERKPGMQDEPIFPWNWESIIDRSKSAEKFILRMTGMCTYLQQEPVLPKSSLLYEEFCVLNELNGAHWSIDGDDEHRFDAADREGIIEELFRRKRTVSYGDVAGWMERERNQIGAHVCGGQGEKGFESKLGSYIFFCKDVFKVERLEQSDYPMIERIILWNTLFEDRKILSQRLKEEYGSRLSAEQIKTICKKRFTGWGRLSEKFLTGITVQVDEDSVSIMDVLREGCPVSGKRGRAMVMMEILRDEELGFQKKVDDFNRAFFAENAQALGVNELPGSPAVRRSLNQSIRIVDEIASIAGKAPANIFIEVTRDEDPKKKGRRTKRRYNDLKDALEAFKKEDPELWRELCETAPNDMDERLSLYFMQRGKCLYSGRAIDIHQLSNAGIYEVDHIIPRTYVKDDSLENKALVYREENQRKTDMLLIDPEIRRRMSGYWRMLHEAKLIGDKKFRNLLRSRIDDKALKGFIARQLVETGQMVKLVRSLLEARYPETNIISVKASISHDLRTAAELVKCREANDFHHAHDAFLACRVGLFIQKRHPCVYENPIGLSQVVRNYVRQQADIFKRCRTIPGSSGFIVNSFMTSGFDKETGEIFKDDWDAEAEVEGIRRSLNFRQCFISRMPFEDHGVFWDATIYSPRAKKTAALPLKQGLNPSRYGSFSREQFAYFFIYKARNPRKEQTLFEFAQVPVRLSAQIRQDENALERYARELAKDQGLEFIRIERSKILKNQLIEIDGDRLCITGKEEVRNACELAFAQDEMRVIRMLVSEKPVSRECVISLFNRILLHGDQASRRLSKQLKLALLSEAFSEASDNVQRNVVLGLIAIFNGSTNMVNLSDIGGSKFAGNVRIKYKKELASPKVNVHLIDQSVTGMFERRTKIGL

SEQ ID NO: 215 - protein, 1077 aa, Neisseria bacilliformis
MQQKPQRYILGLDLGIASVGWACVWADENEHPTGLLDCGVRTFERAEVPKTGDSLALARRQARSVRRLIRRRAHRLLRLRRLLKREGVLLSADFNENGLVRGLPIDAWALRVAGLDRKLSNKEWAAVLLHLVKHRGYLSQRKNETQSKDKELGRLLAGVNGNREALQNRSDEYRTAAELAVKKFAAENNGSLRNKGGDYSHTFDRKDLQRELHLLFERQRALDNPFTSSEMEAAVDELLMKQRSALQGEAVLKMLGRCTFEPSEYKAAKNTYSAERFVWLTKLNNLRIQYNGEERALSEAERRLLLDEPYQKAKLTYKQVRTILELPESAVFKGLRYGHGEDGLKAESGTLMEMKAYHAVRKALKDAGLEGEWENRIRNPELLDAIGTAFSLYKTDEDIRANLAAFRLSENVLEALLAGLNFDKFVHLSLKALAKILPLMEQGMRYDEACKEAYGDHYGAKEQEDHRLLPPFVADDIRNPVVFRTLTQARKIVNEIVRRYGSPLRVHIETGREVGKSFSDRKEIEKRQEENRKERERAAAHFKELFPNFAGEPKAQDILKLRLYEQQHGKCLYSGKEIDLRRLPEKGYVEIDHALPFSRTWDDSFNNKVLVLGKENQDKRNRTPYEYLDGKGNSGAWRAFAERVSGCRFPYAKKQRLLTQKLDEKTEQGFLERNLNDTRYVARFLCQFIEEKMHLEGAGKKRVFASNGQITALLRGFWGLKKVREENDRHHALDAVVVACSSVSMQQKITRHFRYREELEHIDRETGEVIHGFPQPWEFFRQEVMTRVFSDDPVSELAEKLDSRPEAVHEFVTPLFVSRAPHRKVTGQGHLETIRSAKRLDEKISVVKLPLTQLKTKDIERIVGYPNREPALYDALAARLAAFKDDPAKAFSEPFYKTGKDGKCGVLVKAVRVENVQKSGLLVRKDESGKMQGVADNATMVRVDVFGKNGKNYLVPVYAWQVEKGELPNRAVVAYADEEDWDEMDDSFEFKFSLYPNDLVEVVTKKDKFFGYYSGFNRATGAINIKEHDLSKSKVKNGVYEGIGVKTAQSFQKYQVDTLGKTIRLCKPEKRMGFKKK

SEQ ID NO: 216 - protein, 1029 aa, Alicycliphilus denitrificans; identical to SEQ ID NO: 193

SEQ ID NO: 217 - protein, 1122 aa, Streptococcus suis; identical to SEQ ID NO: 87

SEQ ID NO: 218 - protein, 1428 aa, Parasutterella excrementihominis
MGKTHIIGVGLDLGGTYTGTFITSHPSDEAEHRDHSSAFTVVNSEKLSFSSKSRTAVRHRVRSYKGFDLRRRLLLLVAEYQLLQKKQTLAPEERENLRIALSGYLKRRGYARTEAETDTSVLESLDPSVFSSAPSFTNFFNDSEPLNIQWEAIANSPETTKALNKELSGQKEADFKKYIKTSFPEYSAKEILANYVEGRRAILDASKYIANLQSLGHKHRSKYLSDILQDMKRDSRITRLSEAFGSTDNLWRIIGNISNLQERAVRWYFNDAKFEQGQEQLDAVKLKNVLVRALKYLRSDDKEWSASQKQIIQSLEQSGDVLDVLAGLDPDRTIPPYEDQNNRRPPEDQTLYLNPKALSSEYGEKWKSWANKFAGAYPLLTEDLTEILKNTDRKSRIKIRSDVLPDSDYRLAYILQRAFDRSIALDECSIRRTAEDFENGVVIKNEKLEDVLSGHQLEEFLEFANRYYQETAKAKNGLWFPENALLERADLHPPMKNKILNVIVGQALGVSPAEGTDFIEEIWNSKVKGRSTVRSICNAIENERKTYGPYFSEDYKFVKTALKEGKTEKELSKKFAAVIKVLKMVSEVVPFIGKELRLSDEAQSKFDNLYSLAQLYNLIETERNGFSKVSLAAHLENAWRMTMTDGSAQCCRLPADCVRPFDGFIRKAIDRNSWEVAKRIAEEVKKSVDFTNGTVKIPVAIEANSFNFTASLTDLKYIQLKEQKLKKKLEDIQRNEENQEKRWLSKEERIRADSHGICAYTGRPLDDVGEIDHIIPRSLTLKKSESIYNSEVNLIFVSAQGNQEKKNNIYLLSNLAKNYLAAVFGTSDLSQITNEIESTVLQLKAAGRLGYFDLLSEKERACARHALFLNSDSEARRAVIDVLGSRRKASVNGTQAWFVRSIFSKVRQALAAWTQETGNELIFDAISVPAADSSEMRKRFAEYRPEFRKPKVQPVASHSIDAMCIYLAACSDPFKTKRMGSQLAIYEPINFDNLFTGSCQVIQNTPRNFSDKTNIANSPIFKETIYAERFLDIIVSRGEIFIGYPSNMPFEEKPNRISIGGKDPFSILSVLGAYLDKAPSSEKEKLTIYRVVKNKAFELFSKVAGSKFTAEEDKAAKILEALHFVTVKQDVAATVSDLIKSKKELSKDSIENLAKQKGCLKKVEYSSKEFKFKGSLIIPAAVEWGKVLWNVFKENTAEELKDENALRKALEAAWPSSFGTRNLHSKAKRVFSLPVVATQSGAVRIRRKTAFGDFVYQSQDTNNLYSSFPVKNGKLDWSSPIIHPALQNRNLTAYGYRFVDHDRSISMSEFREVYNKDDLMRIELAQGTSSRRYLRVEMPGEKFLAWFGENSISLGSSFKFSVSEVFDNKIYTENAEFTKFLPKPREDNKHNGTIFFELVGPRVIFNYIVGGAASSLKEIFSEAGKERS

SEQ ID NO: 219 - protein, 1371 aa, Lactobacillus buchneri
MKVNNYHIGLDIGTSSIGWVAIGEDGKPLRIKGKTAIGARLFQEGNPAADRRMFRTTRRRLSRRKWRLKLLEEIFDPYITPVDSTFFARLKQSNLSPKDSRKEFKGSMLFPDLTDMQYHKDYPTIYHLRHALMTQDEKFDIRMVYLAIHHIVKYRGNFLNSTPVDSFKASKVNFVDQFKKLNELYTAINPEESFQINLANSEDIGHQFLDPSIRKFDKKKQIPKIVPVSVDDKATDKINGKIASEIINAILGYKSKLDVVVQCTPVDSKSWALKFDEEDIDAKLQKILPEMDENQQSIIAILQNLYSQVTLNQIVPNGMSLSESMIEKYNDHHDHLKLYKKIIDQLADPKKKAALKKAYSQYVGDDGKVIEQADFWSSVKKNLDDSDLSKQIMDLIDAEKFMPKQRTSQNGVIPHQLHQRELDEIIEHQSKYYPWLAEINPNKHDLHLAKYKIEELVAFRVPYYVGPMITPDDQAKSAETVFSWMERKGKEAGQITPWNFDEKVDRNASANRFIKRMTTKDTYLIGEDVLPDESLLYEKFKVLNELNMVRVNGKLLKVADKQAIFQDLFENYKHISVKKLQNYIKSKTGLPSDPEISGLSDPEYFNNSLGTYNDFKKLFGNKVDEPDLQDDFEKIVEWSTVFEDKRILREKLNEITWLSDQQKDVLESSRYQGWGRLSKKLLTGIVNDQGERIIDELWNTNKNFMQIQSDNDFAKRIHEANADQMKAVDVEDVLADAYTSPQNKKAIRQVVKVVDDIQKAMGGVAPKYISIEFTRSEDRNPRRTISRQRQLENTLKDTAKSLAKSINPELLSELDNAAKSKKGLTDRLYLYFTQLGKDIYTGKPINIDEISTYDIDHILPQAFVKDDSLNNRVLVSKAINNGKSDNVPVQLFGAKMGHFWKQLAEAGLISKRKLKNLQTDPDTISKYAMHGFIRRQLVETSQVIKLVANILGDKYRNDNTKIIEITARMNHQMRDEFGFIKNREINDYHHAFDAYLTAFLGRYLYHRYIKLRPYFVYGDFKKFKEDKVTMRNFNFLHDLTDDTQEKIADAETGEVIWDRENSIQQLKDVYHYKFMLISHEVYTLRGAMFNQTVYPASDAGKRKLIPIKADRPINVYGGYSGSADAYMAIVRIHNKKGDKYRVVGVPMRARDRLDAAKKVSDADCDRALKDVLTPQLTKTKKSRKTGEITQVVEDFEIVLGKVMYRQLMIDGDKKFMLGSSTYQYNAKQLVLSDQSVKTLASKGRLDPLQESMDYNNVYTEILDKVNQYFSLYDMNKFRHKLNLGFSKFISFPNHNVFDGNTKASSGKREILEEVLNGLHANPTFGNLKDIGITTPFGQLQQPNGILLSDEAKIRYQSPTGLFERTVSLKDL

SEQ ID NO: 220 - protein, 1090 aa, Sphingomonas sp.
MDWRLGLDLGANSLGWAALRLDRAGDPIGILAMGSRIFSDGRDPKSGASLAVDRRAARAMRRRRDRFKQRQAALLKYLIRDGLFPADQADRQRLADEDPYALRARALDEELSLFEIGRALFHLNQRRGFQSNRKADRGQDDEAGKIAVGVDRLNQQMEEQGARTLGEFLHQRRRAATDANHIPSVRTRLRPETGEGAKGDGYDFYPSRALIAEEFEEIWAAQAPHYPDTLTQQVHDRLYEIIFHQRPLRAPQVGQCTLVAGETRLPKAHPLFQKRRLLEEINALMIVRPGEIAQRLTPEERDTLYLKLKDKRTVSFATLRKTLKLDSAARFNKESENRTELKGDEVAAELGAKTRLGTRWQHLSGDQQWEVVHRLMALESQADEAAFRDWISQTYDLLPEQAAAVLGARLPQGHGRFGPTATTTLIDSLLHDRTEDGRVVVYSEAVQRSGLGHHSDLRHDRDDEDVTELPYYGVALERHIMPGTAEPTDPEEMRIGRLTNPTVHIGLNQLRHVVNRLIRAYGPPKEIAIELARELKLSEDEKKKRNSENRDNRLAAEGRSKKLEEIRQRDTGANRALLKLWEELNPGNVLDRRCIYTGEQISIDMLFSDRVEVDHILPFAQTLDDSNGNKLLCLREANREKRRRSPYEAWGHTDRWPDIAERASRLPKPKRWRFEPDAMQRFATEDGFLARHLVDTQYLGRLAREYLSWLYPGRGEGSGHVWVSPGRLTEMVRRKLGLNDLLPDHNFGGGADQPKNRLDHRHHAIDALVVAIVDRGMLQAIARASGQDGSEGRERIHIPAPWDGFRDDLRVAVNGIIVSHRPDHGTVAKAGLARGRDQTAGRLHNDTAYGLTGETDAKGNSIVVRRIPLSAIKKPADIARVRDPLLRNALAEFTKGLDGKAFEARIGRFHELGPLLYRGIRRVRVVETLTVIPIRDAEGRAYKGYKGDSNYRYDVWEMPDGKWRCQVVSMFDAHQSTEQARPHPAARKILSLQRNDILAIERTEGDRELVRVVKFSEKQFAVAPPHEGGSLKTRDGNADDPFRYLYPSPNTLKGWRARQVRIDELGRVLDPGFPARKSVRRTRPRAAPVD

SEQ ID NO: 221 - protein, 1000 aa, Kingella kingae
MARAQRRLISRRANRMNKLRRLLKQENVLQANDYDEKGLIIGLPNQAWELRAQGLDRKLEPKEWAAVLINLVKHRGYLSQRKNESQTADKELGALLSGMNHNHQLLQSQSNQYRTPAELAIKQFATQDGHIRNQRGAYTHTFNRLDLQNELNQLFDAQTRLGNPHVSGSLKTAINDLLMNQKAALSGDAILEMLGRCTFEPSEYKAAKNTYSAERFVWLGKLTNLRIQDNGLESALSREQRELLLNEPYNKTKLTYQQVRKLLRLPETAFFKGLRYGKDNAESATFMEMKSYHAIRKSLENKSLKSEWEKLKTQPKLLDLIGTAFSIYKTDDEIAGCLKNQLPENVIIALQEQLNFSNFMELSLKALEKLLPLMEQGLRYDEACTQIYGNRHEKIADKTEKFLPNIPADKLRNPVVLRTLTQARKVINAIIRRYGSPARVHIETGREVGKSFSDRDKLKKQQEENQEQRRRAIDEWKQFFPNAAHEPKAVDILKLRLYQLQQGKCLYSGLPIDVRRLPEKGYVEIDHALPFSRTWDDSFNNKILVLASENQNKGNQTPYEYLRGADNSESWRLFVENVQNCQFSPNKKQKIMAKQLDEKGFLERNLNDTRYVSRFLCQFISEHLHLTGKGKKRVFASNGQITALLRGRWGLSKNREENDRHHAVDAVVVACSTVAMQQKITQFVRYQKGNVFTGERIDKETGEVISIHFPTPWEHFREEVMIRVFDDNPLRTLPEKLPNRPEALHEYVMPLFVSRMPTRKMTGQGHKETIKSAKRLDEKISVLRVPLTQLKLNDLENMVNREREPALYEALKARLEQFKNDPAKAFAEPFFKQGGQQVKAVRVEIVQKSGMLLRKINGVADNGSMVRVDVFEKSGKFYLVPIYAWQVAEGILPNYAVVAHKDESDWILMDESYHFKFALYKNDLLEVQTKKGGIMGYFASLDRATGAITIREHDRDKKKCKDGEHRSIGVKMASSFKKLQVDELGKNIHETRSRKRPNIG

SEQ ID NO: 222 - protein, 1130 aa, Streptococcus pasteurianus
MTNGKILGLDIGIASVGVGIIEAKTGKVVHANSRLFSAANAENNAERRGFRGSRRLNRRKKHRVKRVRDLFEKYGIVTDFRNLNLNPYELRVKGLTEQLKNEELFAALRTISKRRGISYLDDAEDDSTGSTDYAKSIDENRRLLKNKTPGQIQLERLEKYGQLRGNFTVYDENGEAHRLINVFSTSDYEKEARKILETQADYNKKITAEFIDDYVEILTQKRKYYHGPGNEKSRTDYGRFRTDGTTLENIFGILIGKCNFYPDEYRASKASYTAQEYNFLNDLNNLKVSTETGKLSTEQKESLVEFAKNTATLGPAKLLKEIAKILDCKVDEIKGYREDDKGKPDLHTFEPYRKLKFNLESINIDDLSREVIDKLADILTLNTEREGIEDAIKRNLPNQFTEEQISEIIKVRKSQSTAFNKGWHSFSAKLMNELIPELYATSDEQMTILTRLEKFKVNKKSSKNTKTIDEKEVTDEIYNPVVAKSVRQTIKIINAAVKKYGDFDKIVIEMPRDKNADDEKKFIDKRNKENKKEKDDALKRAAYLYNSSDKLPDEVFHGNKQLETKIRLWYQQGERCLYSGKPISIQELVHNSNNFEIDHILPLSLSFDDSLANKVLVYAWTNQEKGQKTPYQVIDSMDAAWSFREMKDYVLKQKGLGKKKRDYLLTTENIDKIEVKKKFIERNLVDTRYASRVVLNSLQSALRELGKDTKVSVVRGQFTSQLRRKWKIDKSRETYHHHAVDALIIAASSQLKLWEKQDNPMFVDYGKNQVVDKQTGEILSVSDDEYKELVFQPPYQGFVNTISSKGFEDEILFSYQVDSKYNRKVSDATIYSTRKAKIGKDKKEETYVLGKIKDIYSQNGFDTFIKKYNKDKTQFLMYQKDSLTWENVIEVILRDYPTTKKSEDGKNDVKCNPFEEYRRENGLICKYSKKGKGTPIKSLKYYDKKLGNCIDITPEESRNKVILQSINPWRADVYFNPETLKYELMGLKYSDLSFEKGTGNYHISQEKYDAIKEKEGIGKKSEFKFTLYRNDLILIKDIASGEQEIYRFLSRTMPNVNHYVELKPYDKEKFDNVQELVEALGEADKVGRCIKGLNKPNISIYKVRTDVLGNKYFVKKKGDKPKLDFKNNKK

SEQ ID NO: 223 - protein, 1119 aa, Lactobacillus coryniformis
MGYRIGLDVGITSTGYAVLKTDKNGLPYKILTLDSVIYPRAENPQTGASLAEPRRIKRGLRRRTRRTKFRKQRTQQLFIHSGLLSKPEIEQILATPQAKYSVYELRVAGLDRRLTNSELFRVLYFFIGHRGFKSNRKAELNPENEADKKQMGQLLNSIEEIRKAIAEKGYRTVGELYLKDPKYNDHKRNKGYIDGYLSTPNRQMLVDEIKQILDKQRELGNEKLTDEFYATYLLGDENRAGIFQAQRDFDEGPGAGPYAGDQIKKMVGKDIFEPTEDRAAKATYTFQYFNLLQKMTSLNYQNTTGDTWHTLNGLDRQAIIDAVFAKAEKPTKTYKPTDFGELRKLLKLPDDARFNLVNYGSLQTQKEIETVEKKTRFVDFKAYHDLVKVLPEEMWQSRQLLDHIGTALTLYSSDKRRRRYFAEELNLPAELIEKLLPLNFSKFGHLSIKSMQNIIPYLEMGQVYSEATTNTGYDFRKKQISKDTIREEITNPVVRRAVTKTIKIVEQIIRRYGKPDGINIELARELGRNFKERGDIQKRQDKNRQTNDKIAAELTELGIPVNGQNIIRYKLHKEQNGVDPYTGDQIPFERAFSEGYEVDHIIPYSISWDDSYTNKVLTSAKCNREKGNRIPMVYLANNEQRLNALTNIADNIIRNSRKRQKLLKQKLSDEELKDWKQRNINDTRFITRVLYNYFRQAIEFNPELEKKQRVLPLNGEVTSKIRSRWGFLKVREDGDLHHAIDATVIAAITPKFIQQVTKYSQHQEVKNNQALWHDAEIKDAEYAAEAQRMDADLFNKIFNGFPLPWPEFLDELLARISDNPVEMMKSRSWNTYTPIEIAKLKPVFVVRLANHKISGPAHLDTIRSAKLFDEKGIVLSRVSITKLKINKKGQVATGDGIYDPENSNNGDKVVYSAIRQALEAHNGSGELAFPDGYLEYVDHGTKKLVRKVRVAKKVSLPVRLKNKAAADNGSMVRIDVFNTGKKFVFVPIYIKDTVEQVLPNKAIARGKSLWYQITESDQFCFSLYPGDMVHIESKTGIKPKYSNKENNTSVVPIKNFYGYFDGADIATASILVRAHDSSYTARSIGIAGLLKFEKYQVDYFGRYHKVHEKKRQLFVKRDE

SEQ ID NO: 224 - protein, 1126 aa, Lactobacillus farciminis
MADRISLGLDIGVASVGFSVLDIDKGKVIELGARLFSATVAAGNQDRRDMRGARRLLNRNKQRRQDTGKLFKKFGLIDDFDKGSFYDNFNQNLNPYELRVKGLTEQLTKEELAESLYQIVKHRGISYALKDADVDEGGTDYSVSLKINSQELAEKTPAQIQLQRLNDYGKVRGQVVIGDDPDNQKVLLNVFPTSAYEKEAKQIIATQQQFYPESLTDKFTEEYCQILTRKRDYFVGPGNEKSRTDYGIYKTDGRTLDNLFEELIGHDKIYPEELRASAASYTAQLFNVLNDLNNLRILNYEDGKLTKEDKEKIIAEIKNNTTTINMLNVIKKVAGCSKDDIKGFRVNEKDKPEISSMPVYRKIHKDLLKAGVDISDWPVEFIDELSFILTLNTENGEIRKQLNNRLAPKFDFLNADLIQLIIDNKDSFEIKTNNKWHRFSVKTMNKLIPEMMERPVEQMTLLNEMGLVKKDKKRFENNKYLPYKEIAKDIFNPVASKSVREALKIVNAVLKKYGHIDYLVVEMPRDKNLKEEQDNIKEFQNKNKKAKDAAFEAFVKSVGSEQRVKEALSKNRKLQMKMRLWYQQQEIDPYNGKTIDATDLINNPDKFEIDHIIPQSISFYDSINNKTLCFASMNQVKGQKTPYEFMLEGHGQSYDKFKATVMANKNFGKAKRANYLFEENVSDIETRKRFLSRNLVDTRYSSRVVLNSLQDFFREKSADTKVTVIRGKFTSNMRKHWHIDKTRETFHHHAIDASIIAATPFLRMWKKGGTIFPVKVGEESIDIETGEILDDKNFDKAMYEEPYSGFVSEIMNADDRIKFSHQVDKKMNRKVSDATIYSTRTGKLAKDKKDAEYIVAKVKDIYSVDGFKKFKKVYDKDKTKFLLYKYDPRTFSKLERIISDCPDKVEKVQTNGKVKAVDISPFEMYRRDHGMIKKYSKKGNGPAIKQLKYLDKKLGSHIDITPANANGKHVILQSLKPWRTDVYLNHETGEYEIMGIKYSDLKFNKNEGYGIKKDKYLEIKKVEEVSEKSEFMFSLYRKDRVKVQDMKTGESVELLFWSRNFSNKKYAELKPISQAENDKKLPVYGKGRLIKRLIPKNCKIWKVNTTILGDPYYLEKESDSPKDILD

SEQ ID NO: 225 - protein, 1380 aa, Eggerthella sp.
MNLRHVGNYNIGLDMGTASVGWAAIDEQGELLHFKGKPTWGSRLFDSANTAATARMPRGQRRRYIRRRWRLDLLQKFFSEEMAEKDPEFFIRLRQSSLWPEDREGGHTAYHWPLFNDSDFNEKEYYEKFPTIFHLRQWLMETDEKADIRLIYLAFHNIVKHRGNFLQENNDSLSAQNANMRESLESFCIALEEWCDEKELTCSCDPQKLEHLFKEVKYRSDIRDGFAALLGLACSGENEVDVKAMAKEMGKAIVGYKADFSKIFTECDKEGSSFRLSDDEGPEAFLDICPDDGIALFEAIQMVYSSFILTGMLTEKGLSLSKISAYNQYGQDLESLKALVKEYVPNEYSSFFRGPTYSGSTEYDPSKAQGYTRYNLGPSKKGSGAKPMAYEDFKKSVEQLFANTNAINDERYKEMMGRFAEEKFLRRLRTSDNGRIPFQLNLEEMTAIIINQGKYYPFLLEQQEKLESLVRFRIPYYVGPLTRINARLDSKGNACFAWSKRKDGMDSASIKPWNWDEVIDKHASAQAFIERMTGTCTYLRGEPVLPRCSLLYEEYCVLNELNGARWTQDGDKFIRFDYKDRSDIIEELFKKRRGRIQYAAVADWMKQERSHANVHVSGGQGENAFESRLSSYHFFCNDVFGVDELPGSYVDMVEEIILWSTLFEDRSILREEIQRKYGDVLNEEQIKTICKKRFSGWGRLSRKLLCSLKAQTDNGPKSIMDILQEGDQNNGRVGRAMVFQEILHDEQLGFEQKIEEENTQSMLEGENLLIEDLPGSPAIRRSINQAVRIVDEIVGIAGHAPDNIFIEVTREDDTKKKGKRTTTRYSNIQKALEALKEEGAEALRELKTYKHNELDKRLSLYFMQNGKSLYSGIPLDIRRLSEYQIDHIIPQSYIKDDSYENMALVLPGENQSKADNLLISQDIRIKMKATWTALHKAGLMGDKKYNNLMNSSISDAKMKGFINRQLVETSQSVKLTQMMLSQKYPGAKVRPIKASISSQLRDACDLVKCREANDYHHAHDAYLACQVGRFVLKRHSSMFDNPIGMTKVIRDFVKRQGQEFKRNGKLPAYASRSGFIVQSFMRSGFDAETGELLRDDWNAPFEIARIKRCLNYRDCYISRMPMEDSGAFWDATIYSPKAGKKGALPVKQGLPVEKYGSYSREQFAYFFVYKAYNPKKKAYRLEFEAVPVRVASAVETRENALEEYAKSVAKQAGLEFVEVARPKVYKYQLIELGEDRLYITGKREVRNASQLAFSLDEIDLLKRLAEGEETSSEERERLFDVLIEKYARYAPRLARQLSVDSMSATFETLNAEEQLGILLSLVEIANGKRNMIDLSSAGGSKNAGCMNPTFSSELSSPGSNFTFIDQSVTGMFERRQRLEL

SEQ ID NO: 226 - protein, 1430 aa, Capnocytophaga canimorsus
MKHILGLDLGTNSIGWAVVKEAQNDNEQSEIVDVGVRVNPLTTDEKTNFEKGKPISTNADRTLKRSARRNLQRYKLRRKELIELLKEHQLISTDTILTENGKGTTFQTLELRAKSAKEKISLEELARVFLTINKKRGYKSSRKAKNEDEGQLIDGMEIAKRLYEENLTTGQLSLQLLKEGKKSLPDYYRSDLQFELDKVWNFQKQFHSHILTDEFYAQLKGKGQRATSALFLAKYQIYTAENKGSREDKKLQAYQWRVDALSKELTREQLAFVITEINNNLNNSSGYLGAISDRSKELYFNNETVGEYLWKQIAANPHTSLKNQVFYRQDYLDEFEQIWKTQSAFYPEILTDELKKELRDVVIFYQRKLKSQKSLVSFCEFENKEIEIKKEDGTSTKKVIGLKVAPKSSPLFQEFKIWQNLNNVLIRKKGSKTKKVDKNQQAVLFEEEKTIFELDLEAKQALFNELNLKGNLKAYYCLEILGYSPKEWEMNYSVLEGNRTNKALYEAYLKITDLEGYDAKNHLKVKLNKDEVELDDLKVPASEIKDMVQAIFKEAGINTDILHFNAELDGKDFENQASYQLWHLLYSYEGDDSKSGNELLYKLLETKFGFKKEYAQILANVSLSDDYGSLSTKAMRKIHPYIKENKFSTACELAGYRHSKHSLTKEENDNRVLKDSLEVLKKNSLRQPVVEKILNQMINLVNALLKKYRTENPNFKFDEIRIELARELKKNAEERANMTVNINKAKTEHEKIIKILKNEFGLPNPTRNDIIRYRLYEELKANGYKDLYTNEYIEKQDLFTKNIDIEHIIPKSRVFDDSFSNKTLSFRKTNLDKGERTAFDYIESKFGADKLEEYVARVEDLYKNNIISKAKYQKLLKKESEIGDGFVERDLRETQYIAKKAKEILLQITPNVLSTSGGITDRLREDWDLINVMKELNLPKYRALGLTQMEDRKYGQQVEVIIDWTKRNDHRHHAMDALTVAFTKHNHIQYLNYLNARKNEKHREHSNIMGIQQLETIKVTDKNGNEKRVFKAPMPNFRQVTKAFLENVLISHKAKNKVVTKNKNKVAGSNKVQEVLTPRGQLHKETVYGKYQYYVQKEEKIGGKFDLETIKKVANPLYQSLLKKRLEENGGDPKKAFTGKNSLAKNPIYLDDAQTEQLPEKVKLVWLENSFSIRKDITPENFKDEKLIDKILDEGVKRILKERLQSFGNDAKKAFSDLDKNPIWLNKEKGIAIKRVAISGVANAEPLHTKKDHLGKEILDKEGKSIPVDFISTGNNHHVAVYRDEKGNLQEKVVSVFEAVVRANQGLPIIDKTYNQHLGWEFLFTMKQNEMFVFSNESTGFNPNDIDLLDPKNKKIISPNLFRVQKFSKLQYGNSFVREFVFRHHLETTVEDRKELQGITYKQMKNSAFFNDIIKVRINHLGGIVSVGEY

SEQ ID NO: 227 - protein, 1348 aa, Finegoldia magna
MKSEKKYYIGLDVGTNSVGWAVTDEFYNILRAKGKDLWGVRLFEKAKTAADTRTFRSGRRRNDRKGVRLQILREIFEDEIKKVDKDFYDRLDESKFWAEDKKVSGKYSLFNDKNFSDKQYFEKFPTIFHLRKYLMEEHGKVDIRYYFLAINQMMKRRGHFLIDGQISHVTDDKPLKQQLILLINDLLKIELEEEFMDSIFEILADVNEKKTEKKNILKELINAQDFNKQEGKILYSIFESIVTGKAKIKNIISDEDILEKIKEDNKEDFVLTGDSYEENLQYFEEVLQENITLFNTLKSAYDFVILQSILKGKSTLSDAQVERYDEHKKDLEILKKVIKKYDEDGKLFKQVFKEDNGNGYVSYIGYYLNKNKKITAKKKISNIEFTKYVKGILEKQCDCEDEDVKYLLGKIEQENFLLKQISSINSVIPHQIHLFELDKILENLAKYYPSFNNKKEEFTKIEKIRKTFTFRIPYYVGPLNDYHKNNGGNAWIFRNKGEKIRPWNFEKIVDLHKSEEEFIKRMLNQCTYLPEETVLPKSSILYSEYMVLNELNNLRINGKPIDTDVKLKLIEELFKKKTKVTLKSIRDYMIRNNFADKEDFDNSEKNLEIVSNMKSYIDFNNILGDKFELEMVEDLIEKITIHTGNKKLLKKYIEETYPDLSSSQIQKIINLKYKDWGRLSRKLLDGITGTNIETGEIDTVINFLRNSSDNLMQIIGSQNYSFNNDIDKLRKKYIPQEISYEVVENLYVSPSVKKMIWQVIRITEEITKVMGYDPDKIFIEMAKSEEGKKTTISRKNKLLALYKAIKKDERDSQYEKLLTGLNKLDDSDLRSRKLYLYYTQMGRDMYTGEKIDLDKLFDSTHYDKDHIIPQSMKKDDSIINNLVLVNKNANQTTKGNIYPVPSSIRNNPKIYNYWKYLMEKEFISKEKYNRLIRNTPLTNEELGGFINRQLVETRQSTKAIKELFEKFYKKSKIIPVKAILASDLRKDMNTLKSREVNDLHHAHDAFLNIVAGDVWNREFTSNPINYVKENREGDKVKYSLSKYFTRPRKSKGKVIWTPEKGRKLIVDTLNKPSVLISNESHVKKGELFNATIAGKKDYKKGKIYLPLKKDDRLQDVSKYGGYKAINGAFFFLVEHTKSKKRIRSIELFPLHLLSKFYEDKNTVLDYAINVLQLQDPKIIIDKINYRTEIIIDNFSYLISTKSNDGSITVKPNEQMYWRVDEISNLKKIENKYKKDAILTEEDRKIMESYIDKIYQQFKAGKYKNRRTTDTIIEKYEIIDLDTLDNKQLYQLLVAFISLSYKTSNNAVDFTVIGLGTECGKPRITNLPDNTYLVYKSITGIYEKRIRIK

SEQ ID NO: 228 - protein, 1352 aa, Megasphaera sp.
MKKRNREEYYVGLDIGTSSVGWAVATPDYRIPKFRGHKMWGSRLFAEGKRAAERRQFRTNRRRLARRRDRLQILEELFAEEMAKVDNTFFMRLKESKFFLEDKTVKEKHILFSTDKFDADRFYKDNPTIYHVRKRLMEEEPQDIRELFLAVHHILKYRGHFLFAGSLEQNGASIEELVRTLLGKQGLAILDDTIDSNEMVNILKNTGETKSDRKKDVQELWNPLKDKVKKAQAAEMAGLVLGLKSDISKLFANSDYKDLDSSIKNINFSSGDYEEKRDDYANSIGDDIVLLDTMKALYDTLILSQILQGKRSISAAKVEDYNTHKEQLRALKAILKPHKRLYNEMFRENNKKDLSNYVAYISSYSEGKRVNREGFYKYVQAVLKQVDDSDSKQAILEAIRLETFLPLLRVKDNAVIPHQIHQAELEAILETARKKYNFLNDVSDGVSVKDKIIQLFTFRIPYYVGPLNPHSGETVADRKQGTGWVVRKQRGKVYPWNFADMVDVKASAEAFITNLTNKCTYLIGEDVLPKRSLLYSEFMLLNELNMIKYDGHELPVAIKQLYIEQVFKQEHKKQTKGRVLDFLKRNGLITGSATAVITGMDDAIKGDLQSYRDMVRIFGAGFDHSMAERIIRWVTLFGEAKDILENKIREVYGNSISDSQMRAIKKLKYADWGRLSQAFLIAVKGCDKSGVERNIITCLRASSQNLMEILSDQGTYIKQIKAWNHQHTTNMMDTLDYQLVDDLYVAPSVKRSIWQSLCIVEELVKIMGQAPKKIFVEVTRTKQAEKTKKDSRKKRLVELYTAIGKEGAAWKKEIEAHQAGDFRRKKLYLYYTQMGRCMYSNEPIAMDALFTSAYDIDHIYPQSLTKDGSWDNLVLVKSQLNKEKSDQYPLRPAIREKNKAHWQYLCRAGFISEKKYERLMRTTELTAEELSGFIARQLVETSQATKAVTGLLERIYTNTEICFVKAETVSQFRHQHNFIKIRELNNYHHAKDAYLNIVVGNVYHEKFTKNPWEFIARSTERRPYNLNRMYDFDLLKQGRVIWQVPKSLETVQAMMKSNDVRITKKLLVQKGELYDATITKAHKAKEGTYFPLKGADARLRDVHRYGGYEKIKIAYYSVFSCREKASNTIHTLIIPIPVYKAGLLQTEADLTAYAWQTKQKTKPIKDIYSAITPIYKKLCINTVVKIDGFKYFLGGKTGDYMWLDPAIPVVLDEQAAAYLKAISKVGRADDVENTAQAIDLITAEANEAFYDVLLKKMEAKIFAKAYQTIVEKLASETARERFRELSIGAQCSCLLEILNLLANNKTTFTFFKDKMGVTMSRRKQPMDLTKLEECIVYETSITGLYEKAVSLL

SEQ ID NO: 229 - protein, 650 aa, Haemophilus pittmaniae
MENKNLHYILGLDLGIASVGWAVVEIDKEENPLCLIDVGVRTFERAEVPKTGESLALSRRLARSARRLTQRRVARLKKAKRLLKLENILLSTDERLPHQVWQLRVEGLDRKLKRQEWAAVLLHLIKHRGYLSQRKNESKSENKELGALLSGVASNHELLQQTTYRTPAELAVKKFEVEEGHIRNQQGAYTHTFSRLDLLAEMELLFSRQQHFGNPFASEKLLENLTALLMWQKPALSGEAILKMLGKCTFEDEYKAAKNTYTAERFVWITKLNNLRIQENGLERALNDNERLILIEQPYEKAKLTYAQVRSILNLSDEAIFKGLRYSGEDKKAIETKTTLMEMKAYHQIRKVLEGNNLKAEWTELKENSTLLDEIGTAFSLYKTDEDISTYLAGKLSQPVLNALLENLSFDKFIQLSLKALYKLLPLMQQGLRYDEACHEMYGDHYGKKTYGKKTEENHYFLPQIPADEIRNPVVLRTLTQARKVINGVVRLYGSPARIHIETGREVGKSYKDRRELEKRQEENRKQRENAIKEFKEYFPHFAGEPKAKDILKMRLYKQQNAKCLYSGKPIELHRLLEKGYVEVDHALPFSRTWDDSFNNKVLVLANENQNKGNLTPFEWLDGKHNSERWRAFKALVETSAFPYAKNNAS

SEQ ID NO: 230 - protein, 1062 aa, Ralstonia syzygii
MAEKQHRWGLDIGTNSIGWAVIALIEGRPAGLVATGSRIFSDGRNPKDGSSLAVERRGPRQMRRRRDRYLRRRDRFMQALINVGLMPGDAAARKALVTENPYVLRQRGLDQALTLPEFGRALFHLNQRRGFQSNRKTDRATAKESGKVKNAIAAFRAGMGNARTVGEALARRLEDGRPVRARMVGQGKDEHYELYIAREWIAQEFDALWASQQRFHAEVLADAARDRLRAILLFQRKLLPVPVGKCFLEPNQPRVAAALPSAQRFRLMQELNHLRVMTLADKRERPLSFQERNDLLAQLVARPKCGFDMLRKIVFGANKEAYRFTIESERRKELKGCDTAAKLAKVNALGTRWQALSLDEQDRLVCLLLDGENDAVLADALREHYGLTDAQIDTLLGLSFEDGHMRLGRSALLRVLDALESGRDEQGLPLSYDKAVVAAGYPAHTADLENGERDALPYYGELLWRYTQDAPTAKNDAERKFGKIANPTVHIGLNQLRKLVNALIQRYGKPAQIVVELARNLKAGLEEKERIKKQQTANLERNERIRQKLQDAGVPDNRENRLRMRLFEELGQGNGLGTPCIYSGRQISLQRLFSNDVQVDHILPFSKTLDDSFANKVLAQHDANRYKGNRGPFEAFGANRDGYAWDDIRARAAVLPRNKRNRFAETAMQDWLHNETDFLARQLTDTAYLSRVARQYLTAICSKDDVYVSPGRLTAMLRAKWGLNRVLDGVMEEQGRPAVKNRDDHRHHAIDAVVIGATDRAMLQQVATLAARAREQDAERLIGDMPTPWPNFLEDVRAAVARCVVSHKPDHGPEGGLHNDTAYGIVAGPFEDGRYRVRHRVSLFDLKPGDLSNVRCDAPLQAELEPIFEQDDARAREVALTALAERYRQRKVWLEELMSVLPIRPRGEDGKTLPDSAPYKAYKGDSNYCYELFINERGRWDGELISTFRANQAAYRRFRNDPARFRRYTAGGRPLLMRLCINDYIAVGTAAERTIFRVVKMSENKITLAEHFEGGTLKQRDADKDDPFKYLTKSPGALRDLGARRIFVDLIGRVLDPGIKGD

SEQ ID NO: 231 - protein, 1052 aa, Haemophilus parainfluenzae
MENKNLHYILGLDLGIASVGWAVVEIDEKENPLRLIDVGVRTFERAETQKGESLALSRRSARSARRLTQRRVARLKKAKRLLKSENILLSTDERLPHQVWQLRVEGLDRKLERQEWAAVLLHLIKHRGYLSQRKNESKSENKELGALLSGVASNHELLQQATYRTPAELAVKKFEVEEGHIRNQQGAYTHTFSRLDLLAEMELLFSRQQHFGNPFASEKLLENLTALLMWQKPALSGEDILKMLGKCTFEDEYKAAKNTYTAERFVWITKLNNLRIQENGLERALSDNERLMLIEQPYEKAKLTYAQVRSILNLSDDAIFKGVRYSGEDKKAIETKTTLMEMKAYHQIRKVLEGNNLKAEWVALKANPTLLDEIGTAFSLYKTDEDISAYLAGKLSQPVLNALLENLSFDKFIQLSLKALYKLLPLMQQGLRYDEACREIYGDHYGKKTEETHHFLPQIPADEIRNPVVLRTLTQARKVINGVVRLYGSPARIHIETGREVGKSYKDRHELKKRQEENRKQREKTISEIKTLFPNFSGEPKGKDILKMRLYYQQNAKCLYSGKPLELHRLFEQKYVEVDHALPLSRTWDDSFNNKVLVLANENQNKGNLTPFEWLDGKNNSERWRTFKALVETSAFPYAKKQRILSQKLDEKGFIERNLNDTRYVARFLCNFIADNMHLTGEGKRKVFASNGQITALLRRRWGLAKSREDNDRHHALDAVLVACSTVAMQQKITRFVRFKAGDVFTGERIDRETGEIIPLHFPTPWQFFKQEVEIRIFSDNPKLELENRLPDRPQANHEFVQPLFVSRMPTRKMTGQGHMETVKSAKRLNEGISMIKMPLTKLKLKDLELMVNREREKDLYDALKTRLEAFNDDPAKAFAEPFMKKGGAIVKSVRVEQVQKSGVLVRQGNGVADNASMVRVDVFTKDGKYFLVPIYTWQVAKGILPNKAVIQGKDEEDWEDIDDATFQFSLHPNDLISVKTKKDEFLGYFNGLNRHTGGINIRTHDLEKSKGKQGIFEGIGVKIALSFEKYQIDELGKNIRLCKPSKRQPVR

SEQ ID NO: 232 - protein, 1331 aa, Lactobacillus sanfranciscensis
MNKQPYNIGLDIGTSSVGWSATELDNRLLHIKGHNGIGVRLFKEGESAADRRGFRTTRRRLARRKWRLRLLNEIFATEIAKVDPSFFARLKQSNVSPKDPNKTMFENILFDDENLDDQKFHHDYKTIYHLRQAIINHPEQKFDIRLIYLAMHHIIKYRGHFLNQANVQDFKGGKIDLEKSFKALNDIFENQGRDLRLVTDKANQYVKVLSDNAKTRSDRKKELSKLLYVPIDKDTDKNSKKVTGEILKAILGNKAKFDVIFGIEVENPKEWVLTFNSDDFDDKIEGLSSQMTDEDSEILLILKELYFALNLSDILNNSVTDKNAKTLSEAMINRYDDHKNQLAMLKKVIDSSDKKHAKELKEAYSAYIDGENNKKISFEDLKKRIQKNLVDSELSQKINDLLDHDYFLPKQRSKENGAIPHQLQQQELDQIIESQKQYYPFLAELNPNEKRSRQAKYKLDELVAFRVPYYVGPMVEVTDSNQENNGKFAWMIRKEQGEITPWNFDEKVDRTETATKFITRMTTTDTYLIGEPVLPKNSLLYQKFVVLNELNNLKINQEIITPGQKQYLYEHVMKKNKRVTLKKIADALVIKGDYPYAPEVKGTTDQKNLNNGLTTYIDLAKIFGNELDDVDREADFEKIIEWSTIFEDQHIFALKLQELKWLTEKQRNQVVKLRYQGWGKLSKELLAGLVDDNGQRIIDLLWSDNQNFMQIVNQKSFKESIADHNGAHLEEKNLKDVINDLYTSPQNKKAIRQVILVVDDIINAVGYEPANIMMEFAREDSNDHRLTNSRSRQLENVYKDITNSWFDNDSVKDELEDKIKNKDKFTDRLYLYFTQGGKDLYTGEPLNIDDLSSYDIDHILPQSFILDNSLDNRVLTSQRNNRVSKEDQLPGELFGTKMHAFWKRLKAAHLISNKKYYNLTLTPNSISKFNNQGRFINRQLVETRQVIKLAAEILHNRYSEEKGTNIVTIKANLTHHMREKFNFYKNRNVNDYHHAFDAYLTAFVGNWLLQQYPKLKPYFVYGDFAKTEINNLKSFNMLYKFEQAHQLNEKDGKIAKDADALLGYMKNVYHFKKMLVTKKLETNHGALFKQTLYPSPAHDIKKRQLIKPKDNRPTDIYGGYTHEERKYMSLVKVIGKKDNEYRMANVPLLKINKNNDIKEILKSQFSNKKFEIVLPKVLKNQLFSENGALFVIGSKGYKYNANQLVLSDLDMKLLNDLSNNKSIDEVTINQLFKNIVDSTNKYMPLYEIKNLNEVVEKFNNLEFNDKKKTITDFLLATHANPTMSNLKNIGLPSYFGRFTSGNAGIKLSENANVIYQSPTGLFSRKVKISDF

SEQ ID NO: 233 - protein, 1473 aa, Flavobacterium branchiophilum
MAKILGLDLGTNSIGWAVVERENIDFSLIDKGVRIFSEGVKSEKGIESSRAAERTGYRSARKIKYRRKLRKYETLKVLSLNRMCPLSIEEVEEWKKSGFKDYPLNPEFLKWLSTDEESNVNPYFFRDRASKHKVSLFELGRAFYHIAQRRGFLSNRLDQSAEGILEEHCPKIEAIVEDLISIDEISTNITDYFFETGILDSNEKNGYAKDLDEGDKKLVSLYKSLLAILKKNESDFENCKSEIIERLNKKDVLGKVKGKIKDISQAMLDGNYKTLGQYFYSLYSKEKIRNQYTSREEHYLSEFITICKVQGIDQINEEEKINEKKFDGLAKDLYKAIFFQRPLKSQKGLIGKCSFEKSKSRCAISHPDFEEYRMWTYLNTIKIGTQSDKKLRFLTQDEKLKLVPKFYRKNDFNFDVLAKELIEKGSSFGFYKSSKKNDFFYWFNYKPTDTVAACQVAASLKNAIGEDWKTKSFKYQTINSNKEQVSRTVDYKDLWHLLTVATSDVYLYEFAIDKLGLDEKNAKAFSKTKLKKDFASLSLSAINKILPYLKEGLLYSHAVFVANIENIVDENIWKDEKQRDYIKTQISEIIENYTLEKSRFEIINGLLKEYKSENEDGKRVYYSKEAEQSFENDLKKKLVLFYKSNEIENKEQQETIFNELLPIFIQQLKDYEFIKIQRLDQKVLIFLKGKNETGQIFCTEEKGTAEEKEKKIKNRLKKLYHPSDIEKFKKKIIKDEFGNEKIVLGSPLTPSIKNPMAMRALHQLRKVLNALILEGQIDEKTIIHIEMARELNDANKRKGIQDYQNDNKKFREDAIKEIKKLYFEDCKKEVEPTEDDILRYQLWMEQNRSEIYEEGKNISICDIIGSNPAYDIEHTIPRSRSQDNSQMNKTLCSQRFNREVKKQSMPIELNNHLEILPRIAHWKEEADNLTREIEIISRSIKAAATKEIKDKKIRRRHYLTLKRDYLQGKYDRFIWEEPKVGFKNSQIPDTGIITKYAQAYLKSYFKKVESVKGGMVAEFRKIWGIQESFIDENGMKHYKVKDRSKHTHHTIDAITIACMTKEKYDVLAHAWTLEDQQNKKEARSIIEASKPWKTFKEDLLKIEEEILVSHYTPDNVKKQAKKIVRVRGKKQFVAEVERDVNGKAVPKKAASGKTIYKLDGEGKKLPRLQQGDTIRGSLHQDSIYGAIKNPLNTDEIKYVIRKDLESIKGSDVESIVDEVVKEKIKEAIANKVLLLSSNAQQKNKLVGTVWMNEEKRIAINKVRIYANSVKNPLHIKEHSLLSKSKHVHKQKVYGQNDENYAMAIYELDGKRDFELINIFNLAKLIKQGQGFYPLHKKKEIKGKIVFVPIEKRNKRDVVLKRGQQVVFYDKEVENPKDISEIVDFKGRIYIIEGLSIQRIVRPSGKVDEYGVIMLRYFKEARKADDIKQDNFKPDGVFKLGENKPTRKMNHNQFTAFVEGIDFKVLPSGKFEKI

SEQ ID NO: 234 - protein, 933 aa, Mycoplasma iowae
SVRDYSDGPGSEKSPTPYGLWRLNKEGKVEKIGENLWDVLVGKCTIYGNDDSIKDEKTKLRGGKNSPIAEVFNFINDLTNIYLFSSSKLKLNSKTKLSILDEFNISLKTSKPIKSFSEKKLVKHIISTTEFKDINFDDVYGYRIDTSKKPLFTKLENTITIAKWLLDNNVYNELNIYDQEDLIKINNIFVILQKSMDINKRAQLVSDEYKIDLPICLELVKKIKGVMQTHSFSYKAMLEYIPVGIKYNDLETGEDTSINASTYFVDKINNLNTKLLFNGRPRKYIPKNIFEDGIISPTSKRAFIQTINVLNKIIKVYSKDYDIDNIAIELPRDKNTAEERKKISSNQKKAGEEIAEVLKFAGLNVEEYTSKLNSKTKLKLKLLKEQNYKDIYDGQEIDVIDVIKNSNKYHEEHIIPYSLCFIDSRRNKVLTKFENNKQKGNKTPFQWLSSIGKYAEFKDRVEKLFVEQKISKAKKELLLFEQDPRTEMLGFIEKNLSDTRYASKLVFDTFRDFFKVNNPNVKIKVINGALTNYARYNLFATYKDGLLERKGIMKQREFYEHHGIDATILAFLGSNHKINQLLKLSHKFKKQDDNKIYDENTGELIEFTKDFLSDEARKKAMELSKQIFEIPCKFSRPIYRKSNVSFSNETLISMKWIDDKYTKGVKINKLSLVNKDLDLNEYFADYETNEMKNLICYQEDKTLYNKLKNIYDKYNNFVENSNIKPVKNPFINYMISNFSSDDSKIQNFKHIIFYDHKGNKKFVKSLKVCGDEKNLSNIVLRKDQKDIMNSKKIKKSGILESLNPISARIYKDNKGKYITIPINSLVLNWTKKGLEIDNEKLCNILKSKNIFNNQFIEINAGQSIINNENKLFYFVGGGDFKVNKLEIKSQFCDNEIFFPRKQMNISIATIIDNYKLCEVDELGKIYNIRKIVL

SEQ ID NO: 235 - protein, 1358 aa, Acidaminococcus intestini; identical to SEQ ID NO: 99

SEQ ID NO: 236 - protein, 983 aa, Campylobacter jejuni
MARILAFDIGISSIGWAFSENDELKDCGVRIFTKAENPKTGESLALPRRLARSARKRLARRKARLNHLKHLIANEFKLNYEDYQSFDESLAKAYKGSLISPYELRFRALNELLSKQDFARVILHIAKRRGYDDIKNSDDKEKGAILKAIKQNEEKLANYQSVGEYLYKEYFQKFKENSKEFTNVRNKKESYERCIAQSFLKDELKLIFKKQREFGFSFSKKFEEEVLSVAFYKRALKDFSHLVGNCSFFTDEKRAPKNSPLAFMFVALTRIINLLNNLKNTEGILYTKDDLNALLNEVLKNGTLTYKQTKKLLGLSDDYEFKGEKGTYFIEFKKYKEFIKALGEHNLSQDDLNEIAKDITLIKDEIKLKKALAKYDLNQNQIDSLSKLEFKDHLNISFKALKLVTPLMLEGKKYDEACNELNLKVAINEDKKDFLPAFNETYYKDEVTNPVVLRAIKEYRKVLNALLKKYGKVHKINIELAREVGKNHSQRAKIEKEQNENYKAKKDAELECEKLGLKINSKNILKLRLFKEQKEFCAYSGEKIKISDLQDEKMLEIDHIYPYSRSFDDSYMNKVLVFTKQNQEKLNQTPFEAFGNDSAKWQKIEVLAKNLPTKKQKRILDKNYKDKEQKNFKDRNLNDTRYIARLVLNYTKDYLDFLPLSDDENTKLNDTQKGSKVHVEAKSGMLTSALRHTWGFSAKDRNNHLHHAIDAVIIAYANNSIVKAFSDFKKEQESNSAELYAKKISELDYKNKRKFFEPFSGFRQKVLDKIDEIFVSKPERKKPSGALHEETFRKEEFYQSYGGKEGVLKALELGKIRKVNGKIVKNGDMFRVDIFKHKKTNKFYAVPIYTMDFALKVLPNKAVARSKKGEIKDWILMDENYEFCFSLYKDSLILIQTKDMQEPEFVYYNAFTSSTVSLIVSKHDNKFETLSKNQKILFKNANEKEVIAKSIGIQNLKVFEKYIVSALGEVTKAEFRQREDFKK

SEQ ID NO: 237 - protein, 1338 aa, Streptococcus macacae
MTKPYSIGLDIGTNSVGWAVVTDGYKVPAKKMKVLGNTDKSHIKKNLLGALLFDSGNTAKDRRLKRTARRRYTRRRNRILYLQEIFAEEMAKADESFFQRLNESFLTNDDKEFDSHPIFGNKAEEEAHHHKFPTIFHLRKHLADSTEKSDLRLIYLALAHMIKFRGHFLIEGQLKAENTNVQTLFDDFVEVYDKTVEESHLSEISVSSILTEKISKSRRLENLIKYYPTEKKNTLFGNLIALSLGLQPNFKTNFKLSEDAKLQFSKDTYEEDLGELLGKIGDNYADLFISAKNLYDAILLSGILTIDDNTTKAPLSASMIKRYEEHQEDLAQLKKFIRQNLPDQYSEVFSDKTKDGYAGYIDGKTNQEAFYKYIKNMLSKTEGADYFLDKIDREDFLRKQRTFDNGSVPHQIHLQEMHAILRRQGEYYPFLKENQDKIEKILTFRIPYYVGPLARKGSRFAWAEYKADKKVTPWNFDDILDKEKSAEEFITRMTLNDLYLPEEKVLPKHSLVYETFNVYNELTKVKYVNEQGKAIFFDANMKQEIFDHVFKENRKVTKDKLLNYLNKEFEEFRIVNLTGLDKENKAFNSSLGTYHDLRKILDKSFLDDKVNEKIIEDIIQTLTLFEDREMIRQRLQKYSDIFTTQQLKKLERRHYTGWGRLSAKLINGIRDKQSNKTILGYLIDDGYSNRNFMQLINDDSLPFKEEIARAQVIGETDDLNQLVSDIAGSPAIKKGILQSLKIVDELVKVMGHNPANIVIEMARENQTTAKGRRSSQQRYKRLEEAIKNLDHDLNHKILKEHPTDNQALQNDRLFLYYLQNGRDMYTEDPLDINRLSDYDIDHIIPQSFIKDDSIDNKVLVSSAKNRGKSDNVPSEDVVNRMRPFWNKLLSCGLISQRKYSNLTKKELKPDDKAGFIKRQLVETRQITKHVAQILDARFNTKRDENKKVIRDVKIITLKSNLVSQFRKDFKFYKVREINDYHHAHDAYLNAVIGKALLDVYPQLEPEFVYGEYPHFHGYKENKATAKKFFYSNIMNFFKKDDIRTDENGEIVWKKDEHISNIKRVLSYPQVNIVKKVEIQTVGQNGGLFDDNPKSPLEVTPSKLVPLKKELNPKKYGGYQKPTTAYPVLLITDTKQLIPISVMNKKQFEQNPVKFLRDRGYQQVGKNDFIKLPKYTLVDIGDGIKRLWASSKEIHKGNQLVVSKKSQILLYHAHHLDSDLSNDYLQNHNQQFDVLFNEIISFSKKCKLGKEHIQKIENVYSNKKNSASIEELAESFIKLLGFTQLGATSPFNFLGVKLNQKQYKGKKDYILPCTEGTLIRQSITGLYETRVDLSKIGED

SEQ ID NO: 238 - protein, 1265 aa, Mycoplasma ovipneumoniae
MHNKKNITIGFDLGIASIGWAIIDSTTSKILDWGTRTFEERKTANERRAFRSTRRNIRRKAYRNQRFINLILKYKDLFELKNISDIQRANKKDTENYEKIISFFTEIYKKCAAKHSNILEVKVKALDSKIEKLDLIWILHDYLENRGFFYDLEEENVADKYEGIEHPSILLYDFFKKNGFFKSNSSIPKDLGGYSFSNLQWVNEIKKLFEVQEINPEFSEKFLNLFTSVRDYAKGPGSEHSASEYGIFQKDEKGKVFKKYDNIWDKTIGKCSFFVEENRSPVNYPSYEIFNLLNQLINLSTDLKTTNKKIWQLSSNDRNELLDELLKVKEKAKIISISLKKNEIKKIILKDFGFEKSDIDDQDTIEGRKIIKEEPTTKLEVTKHLLATIYSHSSDSNWININNILEFLPYLDAICIILDREKSRGQDEVLKKLTEKNIFEVLKIDREKQLDFVKSIFSNTKFNFKKIGNFSLKAIREFLPKMFEQNKNSEYLKWKDEEIRRKWEEQKSKLGKTDKKTKYLNPRIFQDEIISPGTKNTFEQAVLVLNQIIKKYSKENIIDAIIIESPREKNDKKTIEEIKKRNKKGKGKTLEKLFQILNLENKGYKLSDLETKPAKLLDRLRFYHQQDGIDLYTLDKINIDQLINGSQKYEIEHIIPYSMSYDNSQANKILTEKAENLKKGKLIASEYIKRNGDEFYNKYYEKAKELFINKYKKNKKLDSYVDLDEDSAKNRFRFLTLQDYDEFQVEFLARNLNDTRYSTKLFYHALVEHFENNEFFTYIDENSSKHKVKISTIKGHVTKYFRAKPVQKNNGPNENLNNNKPEKIEKNRENNEHHAVDAAIVAIIGNKNPQIANLLTLADNKTDKKFLLHDENYKENIETGELVKIPKFEVDKLAKVEDLKKIIQEKYEEAKKHTAIKFSRKTRTILNGGLSDETLYGFKYDEKEDKYFKIIKKKLVTSKNEELKKYFENPFGKKADGKSEYTVLMAQSHLSEFNKLKEIFEKYNGFSNKTGNAFVEYMNDLALKEPTLKAEIESAKSVEKLLYYNFKPSDQFTYHDNINNKSFKRFYKNIRIIEYKSIPIKFKILSKHDGGKSFKDTLFSLYSLVYKVYENGKESYKSIPVTSQMRNFGIDEFDFLDENLYNKEKLDIYKSDFAKPIPVNCKPVFVLKKGSILKKKSLDIDDFKETKETEEGNYYFISTISKRFNRDTAYGLKPLKLSVVKPVAEPSTNPIFKEYIPIHLDELGNEYPVKIKEHTDDEKLMCTIK

SEQ ID NO: 239 - protein, 1535 aa, Flavobacterium columnare
MTKILGLDLGTNSIGWAIRDTENEGINQILDKGARIFSEGVKSENGKEISRAAERTAYRSARKIKYRRKLRKYETLKVLSINGMCPLSVEEVEQWKKSGFKEYPLNPEFLDWLRTNEDKNINPYLFRDKASKQKVTLFELGRALYHIAQRRGFLSNRLDQSAEGVFEEHNPQIQNLIEDLDSSNTILNELKEYYINLGIIDETEKSGFKKDLDEGEKKLKSLYNSLVAITKKNANDIETCKQELIARLNKKEDLGKVKGKIKDISQAMLDRNFKTLGQYFFSLYNKERIRNQYTSREEHYLEEFIIICQTQGIEGINTNEKLPEKKFTGLAKDLYRAIFFQRPLKSQKGLIGKCSFEKNKSRCAVSHPDYEEFRMWSYLNTIKIGTQSEKTLRFLTLEEKLKLVPKFYRKSDFNFEVLAKELVEKGASFGYYKSSKKNEFFYWFNYKPTDSVSACVVSASLENAIGKDWKIKTFEYQTRNTEKNEVTKSVDYKDLWHLLSVATSDTYLYDFAIEKLKLEPKNAKAFSKTKLKKDFASLSLAAIAKILPYLKQGLLYSHAVFMANIENIVDADIWKDEEQQKFIQSKIVELVDNYIVEKSKLELINGLLKIYNTEDKEGRKVYYSKEAESLFEADLRKKLVPFYKANIIIEEHEQEIIFQDLFPILMDQLKKQEFIKIGRLDKQIEAFLEGENEEGQIFCNHTDKLKKLYHPSDIEVFKKKTIKDEWGNEKVVLGSPLTTSIKNPMAMRALHQLRKVLNTLIANDQIDEDTRIHIEMARELNDANKRKGIQDFQNENKKFREEAIKEIKKLYLEECHKDVNPTEDDILRYQLWLEQGKCEIYEEGNNISICDIIGSNPSYDIEHTIPRSISQDNSQMNKTLCSLKFNRSIKKQKMPVELSNYNDILPRIAHWKKEAEELTRQIETISRSIKSAATKVAKDKNIRKRHYLTLKRDYILGKYERFTWEEPKVGFKNSQIPDTGIITKYAQAYLKSYFKRVESVKGGAVAEFRKLWGIQESFIDENWWKHYKDKDRDKHTHHTIDAITIACMPKDKYDLLAHAWRLEDEQDKKAAKVLIEQAKPWKTFKEDIEKIETEILVSHFTPDNVKKQSKSIIKNRGKKVYVLKNELPVNFKNKIEGKDYFKLKFDSKILYKIPKKKEKQTDTFYEELPKNYLNGVEGKDYFKINTTGKTFYKIPIFNQGDTIRGSLHQETTYGAIKLPDIDIETKKPLHTDKGGFILKKDIKGNEIVFFVVRKEISKISENDVQNIVDNVVRKKIENAIANSLITFKIVKKKKVAVIKEGVTIWMREPNIEKGIEGIPIKKVRIITNSVKNPIEIKVHSPLSKSRHKHKQKVYGQNDENYAMALYELDGKREFELINNFNLAKLLKQSQSYYPLHKEKEIKGKKILVPIEKRNNKDVILKRGQQVVFYDKTVENPKDISEIIDFRERIYIIEGLTIQRQKDKKTSKVNEYGIIQLRHFKEARKSEEISKDNFKPDGEFKINENKPTRKMNHNQFTAFVEGIDFKVLPSGKFQKI

SEQ ID NO: 240 - protein, 1459 aa, Flavobacterium columnare
MKFNLGLDIGTNSIGWALVNEDYENKKGKIIAAGSRIIPMTQDILDKFGSGAITETQTALRTDYRSKRKLIQRFLLRRERLHRVLNVLDFLPKHYAESIDFEKYFGKFLPNTEPKLAYNQNQFIFQNSFLEMLKEFQEKHPELLTNNKKIPYDWTIYYLRKKALNQRIEKEELAWLLLQFNQKRGYNQLRDEEEESVPNKQVEFYSLKIIDVVADQPKEGRDKRWYSINLENGWTYRRESKTPLFNWEGKTKDFIVTTDLNQDGSIKKDKEGKEKRSFRAPSEGDWTLLKKKTEKEIYESGKTLGTYIYDALLNTPDLKIKGDFIRTIDRSIYKEELQQIINKQKEYHLELNSSKLYKACLEELYPKNEIYKSALKNKDIAYLFINDILYYQRPLKAPKYNIGKCTYESRTFKKEDKKIREYIPAVAKSHPLFQEFRLWQWIKNLKIYEKLSSDNCTDFFLTNEQDFENLFEFLWNKKEIDHKGILEYLVKTKFPDLKPKQVKTKVKEYRWNYVYDHEKDESKTYPCGETYFLLKNKLDKIYNAQDDFLDKERLYNLWHIIYSVTDKKQYEKALAKFALKNHLDTKSFVNTFKRIPPFKNDYAIYSLKAIKKLLPLMRVGKYWNYDDIDPITKQKIQCIITGEENDTISTLVREKTNHFSNENDFKNLPLWLAGYIVYNSHNESSEIEKWKSPQDIDTFLKKFKQHALRNPIVEQVVTETLRVVRDIWSKKGQGKKDFFNEIHIELGKDLKNPVDKRRKLSSTNTKNESTNTRIKALLIELFTQGVENVKPNSPKHQEILKIFEEGALNSGIEIEEDIIKISNTDQPTKKQLELYILWLEHKYKSPYTGQSIPLSKLFTPNYEIEHIIPRSKYYDDNLSNKVICETEINRLKNNQLGYEFINNHEIREVTLEEGKTIRLLSPEQYWNFVTTYYAKNKAKRENLLLKELPVQMVEKQLNDTRYVSKYVMQLLSKIVRKEDGTDNGINSTNILSISGKMTRALKNDWDLNDVWNDLLLYRFERLNTITKTNLFTTYSEQKQKRMPIVPDQYAKGFHKKRLDHRHHALDAIVIACITRNHINYMNNQNIQGEKLKKNAIEKENYREILQKSRLDIRAQLCEKKYNDNDPTKYNWVFIKPWADFTENTKDILESIIPSFKQNLRIINKTVNYYEKYNENGKKVKVRQIKGDNWAIRKPLHKETISGKVHLSYKTPAKGKILTATRKVLDSSMDFKSIEKITDTGIQKILKNYLEYKKSPELAFSPEGIEELNATITKYNNGFHHKPIYKVRIYEEGVKFPLGNKGNKKSKYVEAEKGTNLFFAIYKDQENNRYFETIPFNDVLETLKKGMSAVPEKNQEENTLVFALSPQDLVFVPTLDEIENPDIVDFKNLTKDQTNRIYKMVSSSGKQCFFIKAEVATSIVNKMEFSTSNKMENSIEGIQIKSNCWKLKLDRLGTITRVIK

SEQ ID NO: 241 - protein, 1389 aa, Oenococcus kitaharae
MARDYSVGLDIGTSSVGWAAIDNKYHLIRAKSKNLIGVRLFDSAVTAEKRRGYRTTRRRLSRRHWRLRLLNDIFAGPLTDFGDENFLARLKYSWVHPQDQSNQAHFAAGLLFDSKEQDKDFYRKYPTIYHLRLALMNDDQKHDLREVYLAIHHLVKYRGHFLIEGDVKADSAFDVHTFADAIQRYAESNNSDENLLGKIDEKKLSAALTDKHGSKSQRAETAETAFDILDLQSKKQIQAILKSVVGNQANLMAIFGLDSSAISKDEQKNYKFSFDDADIDEKIADSEALLSDTEFEFLCDLKAAFDGLTLKMLLGDDKTVSAAMVRRFNEHQKDWEYIKSHIRNAKNAGNGLYEKSKKFDGINAAYLALQSDNEDDRKKAKKIFQDEISSADIPDDVKADFLKKIDDDQFLPIQRTKNNGTIPHQLHRNELEQIIEKQGIYYPFLKDTYQENSHELNKITALINFRVPYYVGPLVEEEQKIADDGKNIPDPTNHWMVRKSNDTITPWNLSQVVDLDKSGRRFIERLTGTDTYLIGEPTLPKNSLLYQKFDVLQELNNIRVSGRRLDIRAKQDAFEHLFKVQKTVSATNLKDFLVQAGYISEDTQIEGLADVNGKNFNNALTTYNYLVSVLGREFVENPSNEELLEEITELQTVFEDKKVLRRQLDQLDGLSDHNREKLSRKHYTGWGRISKKLLTTKIVQNADKIDNQTFDVPRMNQSIIDTLYNTKMNLMEIINNAEDDFGVRAWIDKQNTTDGDEQDVYSLIDELAGPKEIKRGIVQSFRILDDITKAVGYAPKRVYLEFARKTQESHLTNSRKNQLSTLLKNAGLSELVTQVSQYDAAALQNDRLYLYFLQQGKDMYSGEKLNLDNLSNYDIDHIIPQAYTKDNSLDNRVLVSNITNRRKSDSSNYLPALIDKMRPFWSVLSKQGLLSKHKFANLTRTRDFDDMEKERFIARSLVETRQIIKNVASLIDSHFGGETKAVAIRSSLTADMRRYVDIPKNRDINDYHHAFDALLFSTVGQYTENSGLMKKGQLSDSAGNQYNRYIKEWIHAARLNAQSQRVNPFGFVVGSMRNAAPGKLNPETGEITPEENADWSIADLDYLHKVMNFRKITVTRRLKDQKGQLYDESRYPSVLHDAKSKASINFDKHKPVDLYGGFSSAKPAYAALIKFKNKFRLVNVLRQWTYSDKNSEDYILEQIRGKYPKAEMVLSHIPYGQLVKKDGALVTISSATELHNFEQLWLPLADYKLINTLLKTKEDNLVDILHNRLDLPEMTIESAFYKAFDSILSFAFNRYALHQNALVKLQAHRDDFNALNYEDKQQTLERILDALHASPASSDLKKINLSSGFGRLFSPSHFTLADTDEFIFQSVTGLFSTQKTVAQLYQETK

SEQ ID NO: 242 - protein, 1425 aa, Prevotella micans
MIQKIFGLDLGTNSIGSSVRNLELGENLTEQLEFFSSDIFGSSVSKNSNGREYSLAGNRSAHRRSRGLNEARRRKLWATLDLLIEHGLCPMSPDSLMQWRTYDKQKGLYRQYPIEDKDFNAWIMLDFNGDGKPDYSSPYQLRRELVVRQFDFDQPIERYKLGRALYHIAQHRGFKSSKGETIADQEKNEKKPIAEEGADIANEMKASETKLSKGLVAYMQENHLKTVGEAFAKLEDERVRIRNNESYRAIRSQYQDEIKEIFTYQKKLSVESELYERLTSEKKGVGTIFYKRPLRSQRGNVGKCTLERNKPRCPIGRPEFEEFRAWTLINNIKIRETAGEPYKQLPIKLRQELLKDCFLSKVKADFKFEDIRKYIEKRLGLSFSNDDKTINYKDSVSIAACPVTVRMKKLLGENWANCRIDGEKRRQAHGKNNNNEHIVSYTEEDIWHVCYNAEDPEEVSNFARKALHWDENKIKELVRLWTSIPQGYAMLSLKAIRNINRMLLLGLKYSDAVLLAKLPDIVPVSDEDILAITKEFLQLEDKLNQEKQINNIVNSLIANYKSKLEENRFADHNYQYQLGEGDDEDINTQIKSHIGAKLWVQIGADEQTKIFQAVRSKYQDFFKSYKRKFVESPKLGELLVAFLTEKFPNVKSKQWERLYHPSQIAIYRPIPVDNDRSKLRLGNPNIGAIKNPTVMRVLNTLRRRVNQLLDDGVISPDETRVVVETARELNDANTKWALDRYNRIRRDENEKIRKILKELNPTTNSISEQDIDKARYIFEQCETDFYTDGKVPYYNKDIKKYKLWLEQGGQCLYTGQTINLTNLFNPNAFDMEHTIPKSISFDNSDQNLTLCESYYNRFIKKNNIPTDMPNYDKDVTINGKEYTAIKPRLQRWKERVDRLSRNVDFWKGQARRAQDKDRKDECIREKHLWDMELAYWKGKLERFTMTDVTDGFKNSQLVDTRVITRHAVLYLKSIFNHVEVQRGETTAEFRKILGLQSIDEKKDRSLHSHHAIDATMLTVIPSAAKRDRMLELFYKIEETKKALKNYNDNNKTGLNLELKGLEEKLDKEKKDCRVGRRVNDLDRFINENIIVSHHTKDQALTPAHRRLRKRGKIVGGKEHPRWQTGDSLRGEIHKASYYGAITQFAKDANGKVLMKDGQAQIDPTIYYVIRRELKYKRSTQDSGFTNWEDLEKVIVDTDLFGLMKGQFPEGTSFKDACEQGFYMIKKGKNGEGDVKTHRIRHVRCKAVKTALRIKEQTYKSSKDYKQFFYAAVGDLYVMCYYTDGKKRDFKIYSLYDISNHRKSGTEDIPKFITDKKGNHLPLDYKLRTGDMVLLYKDNPEELKDLDQVNLKRRLYKVNRFESEGLIILLTHHLSTTTERGCSIGKIENYQNLPTAIRCGIKTIKFLIMGKHRDFVIRNGNIEFKH

SEQ ID NO: 243 - protein, 1473 aa, Mucilaginibacter paludis
MKNILGLDLGTNSIGWALIEKDTDQKNGNILGTGSRIIPMSQDIKDEFGKGNSISQTADRTKFRSVRRLRERHLLRRERLHRVLNVLGFLPKHYADQIDFKKRLGKLVNETEPKLVYDNKNFIFKKSFEAMLSDFNQHQPLLLADGKKVPFDWTIYYLRKKALTEKIEKEELAWLILNFNQKRGYYQLRGEEEEENPNKMVAFHSLKIVEVIADESQKGKAETWYSLILENGWIYRRSSKTPLYDWKGKQRDFIVTTDLNDDGSIKTDKEGLEKRSFRAPVEDDWTLVKKKTEQEINRSHKTVGTYIYENLLQDPKQKIKGKLVRTIEREFYKDELKMILKNQQKFHPELNDEHLYINCVRELYRNNQAHQTILSKKDFVHLFIDDIIFYQRPLRSQKSSISNCTLEFRKYKNENGTDQTDYLKAIPKSHPLFQEFRLWQWIYNLGIYQKEDDTNVTDELIKNIDGYQDLFDFLNNKKEIRQDILIKFLVEQTGLKGKPLSSVVAKYRWNFVEDKIYPCNETGTQIRTRLAKVENTPEDFLTAETEIKLWHIIYSVNDKADYEKALKTFAEKHNLDTHSFVENFKKFPPFKSEYGSFSEKAIKKLLPLIRLGKYWSWENIDKKTQERIEKILTGEFDEAIKSRVRDKAIHLTEEDHFQGLQLWLASYVVYGRHSEADNLDKWHTVADLEDYLAEFRQHSLRNPIVEQVITETLRVVKDIWLQYGQGAKDFFSEIHIELAREMKNTGDERKRLTSLVTDNENTNLRIKVLLSELLNDGNVENVRPYSPMQQEALKIFEDGVLNSDIEIEDDILKISKMAQPTNTELKRYKLWLEQKYRSPYTGQIIPLNRLFTADYEIEHIIPQSRFFDDSFSNKIICESAVNQLKDKQLGLEFIKNHSGTIVKLGMGKTAKILDVESYNEFVKGNYTKNISKRNKLMLEEIPDKMIERQLNDTRYISKFIISALSNIVRSESNDDGFNSKNVLPGNGKITSRLKQDWGMNDIWNELILPRFERMNKITDSAVFTAWNENNQKFLPIVPLEFSKGFQKKRIDHRHHALDALVIAASTREHINLLNNEHAKSDKRFDLNRKLRKFEKVAYNDPKTGKRIEKEVPTIFLKPWETFTVDAKNSLESIIVSFKQNLRVINRATNYSESYNDENGALRLGKDGNPLKEKIKQSKGDSWAIRKPMHKDFVYGKVHLQNVKLPKDKFITAIRKSLDVTFDLKRIETITDTGIQKILKNYLHSKENKVELAFSPEGIEDMNQHIERYNDGKKHQPIHKVRVFEIGSRFSLGESGNKKTKFVEAAKGTNLFFAVYQDDNKGKRNYETIPLNIVIERQKLGLHSVPTEDAKGGKLLFHLSPNDMVYVPTSEELEDNLASVNIKRLNTAQRKRIYKVEKASGVECYFIRQDIAYLIKNYDAKTKIGELESQNKLQTTMTDDRLKITDVCVKLNIDRLGSIAETFLGNQYGASKKT

SEQ ID NO: 244 - protein, 1365 aa, Filifactor alocis
MTKEYYLGLDVGTNSVGWAVTDSQYNLCKFKKKDMWGIRLFESANTAKDRRLQRGNRRRLERKKQRIDLLQEIFSPEICKIDPTFFIRLNESRLHLEDKSNDFKYPLFIEKDYSDIEYYKEFPTIFHLRKHLIESEEKQDIRLIYLALHNIIKTRGHFLIDGDLQSAKQLRPILDTFLLSLQEEQNLSVSLSENQKDEYEEILKNRSIAKSEKVKKLKNLFEISDELEKEEKKAQSAVIENFCKFIVGNKGDVCKFLRVSKEELEIDSFSFSEGKYEDDIVKNLEEKVPEKVYLFEQMKAMYDWNILVDILETEEYISFAKVKQYEKHKTNLRLLRDIILKYCTKDEYNRMFNDEKEAGSYTAYVGKLKKNNKKYWIEKKRNPEEFYKSLGKLLDKIEPLKEDLEVLTMMIEECKNHTLLPIQKNKDNGVIPHQVHEVELKKILENAKKYYSFLTETDKDGYSVVQKIESIFRFRIPYYVGPLSTRHQEKGSNVWMVRKPGREDRIYPWNMEEIIDFEKSNENFITRMTNKCTYLIGEDVLPKHSLLYSKYMVLNELNNVKVRGKKLPTSLKQKVFEDLFENKSKVTGKNLLEYLQIQDKDIQIDDLSGFDKDFKTSLKSYLDFKKQIFGEEIEKESIQNMIEDIIKWITIYGNDKEMLKRVIRANYSNQLTEEQMKKITGFQYSGWGNFSKMFLKGISGSDVSTGETFDIITAMWETDNNLMQILSKKFTFMDNVEDFNSGKVGKIDKITYDSTVKEMFLSPENKRAVWQTIQVAEEIKKVMGCEPKKIFIEMARGGEKVKKRTKSRKAQLLELYAACEEDCRELIKEIEDRDERDFNSMKLFLYYTQFGKCMYSGDDIDINELIRGNSKWDRDHIYPQSKIKDDSIDNLVLVNKTYNAKKSNELLSEDIQKKMHSFWLSLLNKKLITKSKYDRLTRKGDFTDEELSGFIARQLVETRQSTKAIADIFKQIYSSEVVYVKSSLVSDFRKKPLNYLKSRRVNDYHHAKDAYLNIVVGNVYNKKFTSNPIQWMKKNRDTNYSLNKVFEHDVVINGEVIWEKCTYHEDTNTYDGGTLDRIRKIVERDNILYTEYAYCEKGELFNATIQNKNGNSTVSLKKGLDVKKYGGYFSANTSYFSLIEFEDKKGDRARHIIGVPIYIANMLEHSPSAFLEYCEQKGYQNVRILVEKIKKNSLLIINGYPLRIRGENEVDTSFKRAIQLKLDQKNYELVRNIEKFLEKYVEKKGNYPIDENRDHITHEKMNQLYEVLLSKMKKFNKKGMADPSDRIEKSKPKFIKLEDLIDKINVINKMLNLLRCDNDTKADLSLIELPKNAGSFVVKKNTIGKSKIILVNQSVTGLYENRREL

SEQ ID NO: 245 - protein, 1130 aa, Streptococcus macedonicus
MTNGKILGLDIGIASVGVGIIEAKTGKVVHANSRLFSAANAENNAERRGFRGSRRLNRRKKHRVKRVRDLFEKYGIVTDFRNLNLNPYELRVKGLTEQLTNEELFAALRTISKRRGISYLDDAEDDSTGSTDYAKSIDENRRLLKTKTPGQIQLERLEKYGQLRGNFTVYDENGEAHRLINVFSTSDYEKEARKILETQADYNKKITAEFIDDYVEILTQKRKYYHGPGNEKSRTDYGRFRTDGTTLENIFGILIGKCNFYPDEYRASKASYTAQEYNFLNDLNNLKVPTETGKLSTEQKESLVEFAKNTAILGPAKLLKEIAKILDCKVDEIKGYREDDKGKPDLHTFEPYRKLKFNLDSVNIDYLSREVLDKLADILTLNTEREGIEDAIKRNLPNQFTEEQISEIINVRKSQSTAFNKGWHSFSAKLMNELIPELYATSDEQMTILTRLEKFKVKKKSSKNIKTIDEKEITDEIYNPVVAKSVRQTIKIINAAVKKYGDFDKIVIEMPRDKNADDEKKFINKRNKENKKEKDDALKRAAYLYNGTDKLPDEVFHGNKQLETKIRLWYQQGERCLYSGKPIPIQELVHNSNNFEIDHILPLSLSFDDSLANKVLVYSWTNQEKGQKTPYQVIDSMDAAWSFREMKEYVLKQKGLGKKKRDYLLTTENIDKIEVKKKFIERNLVDTRYASRVVLNSLQSALRELGKDTKVSVVRGQFTSQLRRKWKIDKSRETYHHHAVDALIIAASSQLKLWEKQDNPMFVDYGNNQVVDKQTGEILSVSDNEYKELVFQPPYQGFVNTISSKGFEDEILFSYQVDSKYNRKVSDATIYSTRKAKIGKDKKEETYVLGKIKDIYSQNGFDTFVKKYNKDKTQFLMYQKDPLTWENVIEVILGDYPTTKKSEDGKNDVKCNPFEEYRRENGLICKYSKKGKGTPIKSLKYYDKKLGNCIDITPEESRNKVILQSINPWRADVYFNPETLKYELMGLKYSDLSFEKGTGNYHISQEKYDAIKEKEGIGKKSEFKFTLYRNDLILIKDIASGEQEIYRFLSRTMPNVNHYVELKPYDKEKFDNVQELVEALGEADKVGRCIKSLNKPNISIYKVRTDVLGNKYFVKKEGDKPKLDFKNNKK

SEQ ID NO: 246 - protein, 1367 aa, Streptococcus pyogenes
MDKKYSIGLDIGTNSVGWAVITDDYKVPSKKFKVLGNTDRHSIKKNLIGALLFGSGETAEATRLKRTARRRYTRRKNRICYLQEIFSNEMAKVDDSFFHRLEESFLVEEDKKHERHPIFGNIVDEVAYHEKYPTIYHLRKKLADSTDKADLRLIYLALAHMIKFRGHFLIEGDLNPDNSDVDKLFIQLVQIYNQLFEENPINASRVDAKAILSARLSKSRRLENLIAQLPGEKRNGLFGNLIALSLGLTPNFKSNFDLAEDAKLQLSKDTYDDDLDNLLAQIGDQYADLFLAAKNLSDAILLSDILRVNSEITKAPLSASMIKRYDEHHQDLTLLKALVRQQLPEKYKEIFFDQSKNGYAGYIDGGASQEEFYKFIKPILEKMDGTEELLVKLNREDLLRKQRTFDNGSIPHQIHLGELHAILRRQEDFYPFLKDNREKIEKILTFRIPYYVGPLARGNSRFAWMTRKSEETITPWNFEEVVDKGASAQSFIERMTNFDKNLPNEKVLPKHSLLYEYFTVYNELTKVKYVTEGMRKPAFLSGEQKKAIVDLLFKTNRKVTVKQLKEDYFKKIECFDSVEISGVEDRFNASLGAYHDLLKIIKDKDFLDNEENEDILEDIVLTLTLFEDRGMIEERLKTYAHLFDDKVMKQLKRRRYTGWGRLSRKLINGIRDKQSGKTILDFLKSDGFANRNFMQLIHDDSLTFKEDIQKAQVSGQGHSLHEQIANLAGSPAIKKGILQTVKIVDELVKVMGHKPENIVIEMARENQTTQKGQKNSRERMKRIEEGIKELGSQILKEHPVENTQLQNEKLYLYYLQNGRDMYVDQELDINRLSDYDVDHIVPQSFIKDDSIDNKVLTRSDKNRGKSDNVPSEEVVKKMKNYWRQLLNAKLITQRKFDNLTKAERGGLSELDKAGFIKRQLVETRQITKHVAQILDSRMNTKYDENDKLIREVKVITLKSKLVSDFRKDFQFYKVREINNYHHAHDAYLNAVVGTALIKKYPKLESEFVYGDYKVYDVRKMIAKSEQEIGKATAKYFFYSNIMNFFKTEITLANGEIRKRPLIETNGETGEIVWDKGRDFATVRKVLSMPQVNIVKKTEVQTGGFSKESILPKRNSDKLIARKKDWDPKKYGGFDSPTVAYSVLVVAKVEKGKSKKLKSVKELLGITIMERSSFEKNPIDFLEAKGYKEVKKDLIIKLPKYSLFELENGRKRMLASAGELQKGNELALPSKYVNFLYLASHYEKLKGSPEDNEQKQLFVEQHKHYLDEIIEQISEFSKRVILADANLDKVLSAYNKHRDKPIREQAENIIHLFTLTNLGAPAAFKYFDTTIDRKRYTSTKEVLDATLIHQSITGLYETRIDLSQLGGD

SEQ ID NO: 247 - protein, 1233 aa, Mycoplasma canis
MEKKRKVTLGFDLGIASVGWAIVDSETNQVYKLGSRLFDAPDTNLERRTQRGTRRLLRRRKYRNQKFYNLVKRTEVFGLSSREAIENRFRELSIKYPNIIELKTKALSQEVCPDEIAWILHDYLKNRGYFYDEKETKEDFDQQTVESMPSYKLNEFYKKYGYFKGALSQPTESEMKDNKDLKEAFFFDFSNKEWLKEINYFFNVQKNILSETFIEEFKKIFSFTRDISKGPGSDNMPSPYGIFGEFGDNGQGGRYEHIWDKNIGKCSIFTNEQRAPKYLPSALIFNFLNELANIRLYSTDKKNIQPLWKLSSVDKLNILLNLFNLPISEKKKKLTSTNINDIVKKESIKSIMISVEDIDMIKDEWAGKEPNVYGVGLSGLNIEESAKENKFKFQDLKILNVLINLLDNVGIKFEFKDRNDIIKNLELLDNLYLFLIYQKESNNKDSSIDLFIAKNESLNIENLKLKLKEFLLGAGNEFENHNSKTHSLSKKAIDEILPKLLDNNEGWNLEAIKNYDEEIKSQIEDNSSLMAKQDKKYLNDNFLKDAILPPNVKVTFQQAILIFNKIIQKFSKDFEIDKVVIELAREMTQDQENDALKGIAKAQKSKKSLVEERLEANNIDKSVFNDKYEKLIYKIFLWISQDFKDPYTGAQISVNEIVNNKVEIDHIIPYSLCFDDSSANKVLVHKQSNQEKSNSLPYEYIKQGHSGWNWDEFTKYVKRVFVNNVDSILSKKERLKKSENLLTASYDGYDKLGFLARNLNDTRYATILFRDQLNNYAEHHLIDNKKMFKVIAMNGAVTSFIRKNMSYDNKLRLKDRSDFSHHAYDAAIIALFSNKTKTLYNLIDPSLNGIISKRSEGYWVIEDRYTGEIKELKKEDWTSIKNNVQARKIAKEIEEYLIDLDDEVFFSRKTKRKTNRQLYNETIYGIATKTDEDGITNYYKKEKFSILDDKDIYLRLLREREKFVINQSNPEVIDQIIEIIESYGKENNIPSRDEAINIKYTKNKINYNLYLKQYMRSLTKSLDQFSEEFINQMIANKTFVLYNPTKNTTRKIKFLRLVNDVKINDIRKNQVINKFNGKNNEPKAFYENINSLGAIVFKNSANNFKTLSINTQIAIFGDKNWDIEDFKTYNMEKIEKYKEIYGIDKTYNFHSFIFPGTILLDKQNKEFYYISSIQTVRDIIEIKFLNKIEFKDENKNQDTSKTPKRLMFGIKSIMNNYEQVDISPFGINKKIFE

SEQ ID NO: 248 - protein, 1375 aa, Lactobacillus johnsonii
MTKIKDDYIVGLDIGTDSCGWVAMNSNNDILKLQGKTAIGSRLFEGGKSAAERRLFRTTHRRIKRRRWRLKLLEEFFDPYMAEVDPYFFARLKESGLSPLDKRKTVSSIVFPTSAEDKKFYDDYPTIYHLRYKLMTEDEKFDLREVYLAIHHIIKYRGNFLYNTSVKDFKASKIDVKSSIEKLNELYENLGLDLNVEFNISNTAEIEKVLKDKQIFKRDKVKKIAELFAIKTDNKEQSKRIKDISKQVANAVLGYKTRFDTIALKEISKDELSDWNFKLSDIDADSKFEALMGNLDENEQAILLTIKELFNEVTLNGIVEDGNTLSESMINKYNDHRDDLKLLKEVIENHIDRKKAKELALAYDLYVNNRHGQLLQAKKKLGKIKPRSKEDFYKVVNKNLDDSRASKEIKKKIELDSFMPKQRTNANGVIPYQLQQLELDKIIENQSKYYPFLKEINPVSSHLKEAPYKLDELIRFRVPYYVGPLISPNESTKDIQTKKNQNFAWMIRKEEGRITPWNFDQKVDRIESANKFIKRMTTKDTYLFGEDVLPANSLLYQKFTVLNELNNIRINGKRISVDLKQEIYENLFKKHTTVTVKKLENYLKENHNLVKVEIKGLADEKKFNSGLTTYNRFKNLNIFDNQIDDLKYRNDFEKIIEWSTIFEDKSIYKEKLRSIDWLNEKQINALSNIRLQGWGRLSKKLLAQLHDHNGQTIIEQLWDSQNNFMQIVTQADFKDAIAKANQNLLVATSVEDILNNAYTSPANKKAIRQVIKVVDDIVKAASGKVPKQIAIEFTRDADENPKRSQTRGSKLQKVYKDLSTELASKTIAEELNEAIKDKKLVQDKYYLYFMQLGRDAYTGEPINIDEIQKYDIDHILPQSFIKDDALDNRVLVSRAVNNGKSDNVPVKLFGNEMAANLGMTIRKMWEEWKNIGLISKTKYNNLLTDPDHINKYKSAGFIRRQLVETSQIIKLVSTILQSRYPNTEIITVKAKYNHYLREKFDLYKSREVNDYHHAIDAYLSAICGNLLYQNYPNLRPFFVYGQYKKFSSDPDKEKAIFNKTRKFSFISQLLKNKSENSKEIAKKLKRAYQFKYMLVSRETETRDQEMFKMTVYPRFSHDTVKAPRNLIPKKMGMSPDIYGGYTNNSDAYMVIVRIDKKKGTEYKILGIPTRELVNLKKAEKEDHYKSYLKEILTPRILYNKNGKRDKKITSFEIVKSKIPYKQVIQDGDKKFMLGSSTYVYNAKQLTLSTESMKAITNNFDKDSDENDALIKAYDEILDKVDKYLPLFDINKFREKLHSGREKFIKLSLEDKKDTILKVLEGLHDNAVMTKIPTIGLSTPLGFMQFPNGVILSENAKLIYQSPTGLFKKSVKISDL

SEQ ID NO: 249 - protein, 1053 aa, Staphylococcus aureus
MKRNYILGLDIGITSVGYGIIDYETRDVIDAGVRLFKEANVENNEGRRSKRGARRLKRRRRHRIQRVKKLLFDYNLLTDHSELSGINPYEARVKGLSQKLSEEEFSAALLHLAKRRGVHNVNEVEEDTGNELSTKEQISRNSKALEEKYVAELQLERLKKDGEVRGSINRFKTSDYVKEAKQLLKVQKAYHQLDQSFIDTYIDLLETRRTYYEGPGEGSPFGWKDIKEWYEMLMGHCTYFPEELRSVKYAYNADLYNALNDLNNLVITRDENEKLEYYEKFQIIENVFKQKKKPTLKQIAKEILVNEEDIKGYRVTSTGKPEFTNLKVYHDIKDITARKEIIENAELLDQIAKILTIYQSSEDIQEELTNLNSELTQEEIEQISNLKGYTGTHNLSLKAINLILDELWHTNDNQIAIFNRLKLVPKKVDLSQQKEIPTTLVDDFILSPVVKRSFIQSIKVINAIIKKYGLPNDIIIELAREKNSKDAQKMINEMQKRNRQTNERIEEIIRTTGKENAKYLIEKIKLHDMQEGKCLYSLEAIPLEDLLNNPFNYEVDHIIPRSVSFDNSFNNKVLVKQEENSKKGNRTPFQYLSSSDSKISYETFKKHILNLAKGKGRISKTKKEYLLEERDINRFSVQKDFINRNLVDTRYATRGLMNLLRSYFRVNNLDVKVKSINGGFTSFLRRKWKFKKERNKGYKHHAEDALIIANADFIFKEWKKLDKAKKVMENQMFEEKQAESMPEIETEQEYKEIFITPHQIKHIKDFKDYKYSHRVDKKPNRELINDTLYSTRKDDKGNTLIVNNLNGLYDKDNDKLKKLINKSPEKLLMYHHDPQTYQKLKLIMEQYGDEKNPLYKYYEETGNYLTKYSKKDNGPVIKKIKYYGNKLNAHLDITDDYPNSRNKVVKLSLKPYRFDVYLDNGVYKFVTVKNLDVIKKENYYEVNSKCYEEAKKLKKISNQAEFIASFYNNDLIKINGELYRVIGVNNDLLNRIEVNMIDITYREYLENMNDKRPPRIIKTIASKTQSIKKYSTDILGNLYEVKSKKHPQIIKKG

SEQ ID NO: 250 - protein, 1063 aa, Simonsiella muelleri
MEKFHYVLGLDLGIASVGWAAIEIDKETETSIGLLDCGVRTFERAEVPKTGDSLAKARREARSTRRLIRRRSHRLLRLKRLLKREIFRQPETFKDLPINAWQLRVKGLDSRLNEYEWAAVLLHLVKHRGYLSQRKSEMSETDSKSEMGRLLAGVAENHQLLQQEQYRTPAELALKKFVKHFRNKGGDYAHTFNRLDLQAELHLLFQKQRELGNPFTSPELERQVDDLLMTQRSALQGDAILKMLGHCGFEPEQFKAAKNTFSAERFIWLTKLNNLRIQDQGKERALTADERTKLLDEPYKKSKLTYAQVRKLLSLPQTAIFKGLRYDLEHDKKAENSTLMEMKSYHNIRQTLEKSGLKTEWQSIATQPEILDAIGTAFSIYKTDEDISHELKTCRLPENVLNELLKNINFDGFIQLSLTALRKILPLMEQGYRYDEACTQIYGNHHSGSLQQESKQFLPHIPIDDVRNPVVFRTLTQARKVVNAIIRRYGSPARVHIEMARELGKSKSDRDRIEKQQQKNKKERENAVAKFKEDFPDFVGEPRGKDILKMRLYEQQHGKCLYSGHDIDINRLNEKGYVEIDHALPFSRTWDDSQNNKVLVLGSENQNKRNQTPDEYLDGANNSQRWLEFQARVQTCHFSYGKKQRIQLAKLDDETEKGFLERNLNDTRYIARFMCQFVQENLYLTGKGKRLVFASNGGMTATLRNLWGLRKVREDNDRHHALDAIVVACSTASMQQKITKAFQRHESIEYVDTETGEVKFRIPQPWDFFRQEVMIRVFSDQPCEDLVEKLSARPEALHDNVTPLFVSRAPNRKMSGQGHLETIKSAKRLSEENSMVKKPLTTLKLKDIPEIVGYPSREPQLYAALKTRLETHDDDPIKAFAKPFYKPNKNGELGALVRSVRVKGVQNTGVMVHDGKGIADNATMVRVDVYTKAGKNYLVPVYVWQVAQGILPNRAVTSGKSEADWDLIDESFEFKFSLSRGDLVEMISNKGRIFGYYNGLDRANGSIGIREHDLEKSKGKDGVHRVGVKTATAFNKYHVDPLGKEIHRCSSEPRPTLKIKSKK

SEQ ID NO: 251 - protein, 1509 aa, Psychroflexus torquis
MKRILGLDLGTNSIGWSLIEHDFKNKQGQIEGLGVRIIPMSQEILGKFDAGQSISQTADRTKYRGVRRLYQRDNLRRERLHRVLKILDFLPKHYSESIDFQDKVGQFKPKQEVKLNYRKNEKNKHEFVFMNSFIEMVSEFKNAQPELFYNKGNGEETKIPYDWTLYYLRKKALTQQITKEELAWLILNFNQKRGYYQLRGEDIDEDKNKKYMQLKVNNLIDSGAKVKGKVLYNVIFDNGWKYEKQIVNKDEWEGRTKEFIITTKTLKNGNIKRTYKAVDSEIDWAAIKAKTEQDINKANKTVGEYIYESLLDNPSQKIRGKLVKTIERKFYKEEFEKLLSKQIELQPELFNESLYKACIKELYPRNENHQSNNKKQGFEYLFTEDIIFYQRPLKSQKSNISGCQFEHKIYKQKNKKTGKLELIKEPIKTISRSHPLFQEFRIWQWLQNLKIYNKEKIENGKLEDVTTQLLPNNEAYVTLFDFLNTKKELEQKQFIEYFVKKKLIDKKEKEHFRWNFVEDKKYPFSETRAQFLSRLAKVKGIKNTEDFLNKNTQVGSKENSPFIKRIEQLWHIIYSVSDLKEYEKALEKFAEKHNLEKDSFLKNFKKFPPFVSDYASYSKKAISKLLPIMRMGKYWSESAVPTQVKERSLSIMERVKVLPLKEGYSDKDLADLLSRVSDDDIPKQLIKSFISFKDKNPLKGLNTYQANYLVYGRHSETGDIQHWKTPEDIDRYLNNFKQHSLRNPIVEQVVMETLRVVRDIWEHYGNNEKDFFKEIHVELGREMKSPAGKREKLSQRNTENENTNHRIREVLKELMNDASVEGGVRDYSPSQQEILKLYEEGIYQNPNTNYLKVDEDEILKIRKKNNPTQKEIQRYKLWLEQGYISPYTGKIIPLTKLFTHEYQIEHIIPQSRYYDNSLGNKIICESEVNEDKDNKTAYEYLKVEKGSIVFGHKLLNLDEYEAHVNKYFKKNKTKLKNLLSEDIPEGFINRQLNDSRYISKLVKGLLSNIVRENGEQEATSKNLIPVTGVVTSKLKQDWGLNDKWNEIIAPRFKRLNKLTNSNDFGFWDNDINAFRIQVPDSLIKGFSKKRIDHRHHALDALVVACTSRNHTHYLSALNAENKNYSLRDKLVIKNENGDYTKTFQIPWQGFTIEAKNNLEKTVVSFKKNLRVINKTNNKFWSYKDENGNLNLGKDGKPKKKLRKQTKGYNWAIRKPLHKETVSGIYNINAPKNKIATSVRTLLTEIKNEKHLAKITDLRIRETILPNHLKHYLNNKGEANFSEAFSQGGIEDLNKKITTLNEGKKHQPIYRVKIFEVGSKFSISEDENSAKSKKYVEAAKGTNLFFAIYLDEENKKRNYETIPLNEVITHQKQVAGFPKSERLSVQPDSQKGTFLFTLSPNDLVYVPNNEELENRDLFNLGNLNVEQISRIYKFTDSSDKTCNFIPFQVSKLIFNLKKKEQKKLDVDFIIQNEFGLGSPQSKNQKSIDDVMIKEKCIKLKIDRLGNISKA

SEQ ID NO: 252 - protein, 1112 aa, Staphylococcus simulans
MLVGLKFKQSILFENMENAEDIKESATGSDAISLSDDYYENLSEFLTDEQLNFIESANTFFMGIMLDRILKGATSISAAKVRDYKIFKSQLKLIKDIVYQNKYDKYHEFFVTSKEDMRAYQENPDAKNFGKLSKFDQYLIHSKDQYAKLMKDLKGLVPKEYTEVLNLIDEQKFLVVQNTTDNASIPYQNNVFEAENILRNQQKYYPEITEEMIGKVINLISFRIPYYVGPLTNKNGQSDFAWMIRKSDEQTLPWNFDKVIDKSKSAEKFIRRMTSKCTYLLEEDVLPKHSLLYQEMEVLNELNNVQLRGENEPKHRIHRLDPKVKQFIYHNLFQKKKNVTHKDLITLLQNSEHRNTLNKTSGQKLKVFGTQNDSKFASKLSTYNDMKAILGSVENKRQMIEELVLWITIFEDKAILKQKIGEKYPNITEKQLNQIVKLNYSGWGRLSEKLLTKEVNGRSLIDLMYSTENNFMEIITDKTLGFDCFIKNSNKVKNAKISYKDVAELRTSPALKKGIWNAIKMVREISNLFGAPEKIIIEFATEDQAKGKRQKSRSELWDDLVKKNNLKRNKEFEGLFEELKAYPDLDFSNPKLWLYIHQNGKCMYTKKPIDLERLMSDTNNQLYEIDHILPRTFVKDDSINNKVLVIQSANQKKSGDKMPLEIFDNHVLVPFWKMLYENDLISSSKLSKLMKKEFNDLDKEGFIQRQLVETRQIISHVSDFLTEEYPSTTVVPMKANVVSELRRKFDIPKIRQLNDWHHAVDAYLNGFVYQAARVFYPKVNLFEFNFKWEKVREKWRQLGEFTENNKKREFFLFKRMENYVNEYGEGMISKLIFDLDNFKFNYSRKVESTESAFYKQSAFSPKNTTAQYDSDKNKTAIYKEMKNKRGIVVSYTYVKKDQELIGYGVFNETVFEYVNNADVDMNTRALKIVRKAFPKLDIKKAQYLFSINKGDALLVNGHPFLFVSAYERINGKQLEFDIAMQRKIKQALSPYNNMTEQEKVEFYNQFAEKVIEEFRNSIGLQSRDRKVNLIKNLFNNTEKSNDSMTQSILEVLKMTKVSAERSKELKIRWNGQTPNTFIDTKNNAEIQYKSITGLKTTKPKSIFKLAESKNEL

SEQ ID NO: 253 - protein, 1274 aa, Mycoplasma gallisept
MNINMNNSIKSKPEVTIGLDLGVGSVGWAIVDNETNIIHHLGSRLFSQAKTAEDRRSFRGVRRLIRRRKYKLKRFVNLIWKYNSYFGFKNKEDILNNYQEQQKLHNTVLNLKLEALNAKIDPKALSWILHDYLKNRGHFYEDNRDFNVYPTEELANYFDEFGYYKGIIDSKNDDDDKLEEGLTKYKFSNQHWLEEVKKVLSNQTGLPEKFKEEYESLFSYVRNYSEGPGSINSVSPYGIYHLDEKEGKVVQKYNNIWDKTIGKCSIFPDEYRAPKNSPIAMIFNEINELSTIRSYSIYLTGWFINQEFKKAYLNKLLDLLIKTNSEKPIDARQFKKLREETIAESIGKETLKDVESEEKLEKDDHKWKLKGLKLNTNGKIQYNDLSSLAKFVHKLKQHLKLDFLLEDQYTPLDKINFLQSLYVYLGKHLRYSNRVDSANLKEFSDSSRLFERVLQEQKDGLFKLFEQTDKDDEKILTQTHSLSTKAMLLAITRMTNLDNDEDNQKNNDKGWNFEAIKNFDQKFIDITKTNNNLSLKQDKRYLDDQFINDAILSPGVKRILREATKVFNAILKQFSEEYDVTKVVIELARELSEEKELENTKNYKKLIKKNGDKISEGLKALGIAEDKIEEILKSPTKSYKVLLWLQQDHIDPYSQKEIAFDDILTKTEKTEIDHIIPYSISFDDSSSNKLLVLAESNQAKSNQTPYEFINSGKAEITWEVYEAYCHKFKNGDSSLLDSTQRSKKFAKMMKTDTSSKYDIGFLARNLNDTRYATIVFRDALKDYANNHLVEDKPMFKVVCINGGVTSFLRKNFDPKSWYAKKDRDKNIHHAVDASIISIFSNETKTLFNQLTKFADYKLFKNTDGSWKKIDPKTGVVSEVTDENWKQIRVRNQVSEIAKVIDKYIQDSNIERKARYSRKIENKTNISLFNDTVYSAKKVGYEDQIKRKNLKTLDIHESAEENKNSKVKKQFVYRKLVNVSLLNNDKLADLFAEKEDILMYRANPWVINLAEQIFNEYTENKKIKSQNVFEKYMLDLTKEFPEKFSEAFVKSMIRNKTAIIYNVEKDVVHRIKRLKILSSELKENKWSNVIIRSKNESGTKLSYQDTINSIALMIMRSIDPTAKKQYIRVPLNTLNLHLGDQDFDLHNIDAYLKKPKFVKYLKANEIGDEYKPWRVLTSGTLLIHKKDKKLMYISSFQNLNDLIEIKNLIETEYKENVDSDPKKKKKASQILRSLSVILNDYILLDAKYNFDILGLSKNKIDEILNSKLDLDKIAK

SEQ ID NO: 254 - protein, 1122 aa, synthetic construct; identical to SEQ ID NO: 23
  REGION 1..1122: note = synthetic sequence

SEQ ID NO: 255 - protein, 1236 aa, synthetic construct; identical to SEQ ID NO: 21
  REGION 1..1236: note = synthetic sequence

SEQ ID NO: 256 - protein, 1059 aa, synthetic construct; identical to SEQ ID NO: 15
  REGION 1..1059: note = synthetic sequence

SEQ ID NO: 257 - protein, 1166 aa, synthetic construct; identical to SEQ ID NO: 39
  REGION 1..1166: note = synthetic sequence

SEQ ID NO: 258 - protein, 1149 aa, synthetic construct; identical to SEQ ID NO: 37
  REGION 1..1149: note = synthetic sequence

SEQ ID NO: 259 - protein, 1314 aa, synthetic construct; identical to SEQ ID NO: 27
  REGION 1..1314: note = synthetic sequence

SEQ ID NO: 260 - protein, 1064 aa, synthetic construct; identical to SEQ ID NO: 38
  REGION 1..1064: note = synthetic sequence

SEQ ID NO: 261 - protein, 1401 aa, synthetic construct
  REGION 1..1401: note = synthetic sequence
MDKKYSIGLDIGTNSVGWAVITDEYKVPSKKFKVLGNTDRHSIKKNLIGALLFDSGETAEATRLKRTARRRYTRRKNRICYLQEIFSNEMAKVDDSFFHRLEESFLVEEDKKHERHPIFGNIVDEVAYHEKYPTIYHLRKKLVDSTDKADLRLIYLALAHMIKFRGHFLIEGDLNPDNSDVDKLFIQLVQTYNQLFEENPINASGVDAKAILSARLSKSRRLENLIAQLPGEKKNGLFGNLIALSLGLTPNFKSNFDLAEDAKLQLSKDTYDDDLDNLLAQIGDQYADLFLAAKNLSDAILLSDILRVNTEITKAPLSASMIKRYDEHHQDLTLLKALVRQQLPEKYKEIFFDQSKNGYAGYIDGGASQEEFYKFIKPILEKMDGTEELLVKLNREDLLRKQRTFDNGSIPHQIHLGELHAILRRQEDFYPFLKDNREKIEKILTFRIPYYVGPLARGNSRFAWMTRKSEETITPWNFEEVVDKGASAQSFIERMTNFDKNLPNEKVLPKHSLLYEYFTVYNELTKVKYVTEGMRKPAFLSGEQKKAIVDLLFKTNRKVTVKQLKEDYFKKIECFDSVEISGVEDRFNASLGTYHDLLKIIKDKDFLDNEENEDILEDIVLTLTLFEDREMIEERLKTYAHLFDDKVMKQLKRRRYTGWGRLSRKLINGIRDKQSGKTILDFLKSDGFANRNFMQLIHDDSLTFKEDIQKAQVSGQGDSLHEHIANLAGSPAIKKGILQTVKVVDELVKVMGRHKPENIVIEMARENQTTQKGQKNSRERMKRIEEGIKELGSQILKEHPVENTQLQNEKLYLYYLQNGRDMYVDQELDINRLSDYDVDHIVPQSFLKDDSIDNKVLTRSDKNRGKSDNVPSEEVVKKMKNYWRQLLNAKLITQRKFDNLTKAERGGLSELDKAGFIKRQLVETRQITKHVAQILDSRMNTKYDENDKLIREVKVITLKSKLVSDFRKDFQFYKVREINNYHHAHDAYLNAVVGTALIKKYPKLESEFVYGDYKVYDVRKMIAKSEQEIGKATAKYFFYSNIMNFFKTEITLANGEIRKRPLIETNGETGEIVWDKGRDFATVRKVLSMPQVNIVKKTEVQTGGFSKESILPKRNSDKLIARKKDWDPKKYGGFDSPTVAYSVLVVAKVEKGKSKKLKSVKELLGITIMERSSFEKNPIDFLEAKGYKEVKKDLIIKLPKYSLFELENGRKRMLASAGELQKGNELALPSKYVNFLYLASHYEKLKGSPEDNEQKQLFVEQHKHYLDEIIEQISEFSKRVILADANLDKVLSAYNKHRDKPIREQAENIIHLFTLTNLGAPAAFKYFDTTIDRKRYTSTKEVLDATLIHQSITGLYETRIDLSQLGGDAYPYDVPDYASLGSGSPKKKRKVEDPKKKRKVD

SEQ ID NO: 262 - protein, 1368 aa, synthetic construct
  REGION 1..1368: note = synthetic sequence
MDKKYSIGLAIGTNSVGWAVITDDYKVPSKKLKGLGNTDRHGIKKNLIGALLFDSGETAEATRLKRTARRRYTRRKNRICYLQEIFSNEMAKVDDSFFHRLEESFLVEEDKKHERHPIFGNIVDEVAYHEKYPTIYHLRKKLADSTDKVDLRLIYLALAHMIKFRGHFLIEGDLNPDNSDVDKLFIQLVQTYNQLFEENPINASRVDAKAILSARLSKSRRLENLIAQLPGEKKNGLFGNLIALSLGLTPNFKSNFDLAEDAKLQLSKDTYDDDLDNLLAQIGDQYADLFLAAKNLSDATLLSDILRVNSEITKAPLSASMIKRYDEHHQDLTLLKALVRQQLPEKYKEIFFDQSKNGYAGYIDGGASQEEFYKFIKPILEKMDGTEELLAKLNREDLLRKQRTFDNGSIPYQIHLGELHAILRRQEDFYPFLKDNREKIEKILTFRIPYYVGPLARGNSRFAWMTRKSEETITPWNFEEVVDKGASAQSFIERMTNFDKNLPNEKVLPKHSLLYEYFTVYNELTKVKYVTEGMRKPAFLSGEQKKAIVDLLFKTNRKVTVKQLKEDYFKKIECFDSVEISGVEDRFNASLGTYHDLLKIIKDKDFLDNEENEDILEDIVLTLTLFEDREMIEERLKTYAHLFDDKVMKQLKRRRYTGWGRLSRKLINGIRDKQSGKTILDFLKSDGFANRNFMQLIHDDSLTFKEDIQKAQVSGQGDSLHEHIANLAGSPAIKKGILQTVKVVDELVKVMGRHKPENIVIEMARENQTTQKGQKNSRERMKRIEEGIKELGSDILKEYPVENTQLQNEKLYLYYLQNGRDMYVDQELDINRLSDYDVDHIVPQSFLKDDSIDNKVLTRSDKNRGKSDNVPSEEVVKKMKNYWRQLLNAKLITQRKFDNLTKAERGGLSELDKVGFIKRQLVETRQITKHVAQILDSRMNTKYDENDKLIREVRVITLKSKLVSDFRKDFQFYKVREINNYHHAHDAYLNAVVGTALIKKYPKLESEFVYGDYKVYDVRKMIAKSEQEIGKATAKYFFYSNIMNFFKTEITLANGEIRKRPLIETNGETGEIVWDKGRDFATVRKVLSMPQVNIVKKTEVQTGGFSKESILPKRNSDKLIARKKDWDPKKYGGFDSPTVAYSVLVVAKVEKGKSKKLKSVKELLGITIMERSSFEKDPIDFLEAKGYKEVRKDLIIKLPKYSLFELENGRKRMLASAGELQKGNELALPSKYVNFLYLASHYEKLKGSPEDNEQKQLFVEQHKHYLDEIIEQISEFSKRVILADANLDKVLSAYNKHRDKPIREQAENIIHLFTLTNLGAPAAFKYFDTTIDRKRYTSTKEVLDATLIHQSITGLYETRIDLSQLGGD

SEQ ID NO: 263 - protein, 1368 aa, synthetic construct
  REGION 1..1368: note = synthetic sequence
MDKKYSIGLDIGTNSVGWAVITDDYKVPSKKLKGLGNTDRHGIKKNLIGALLFDSGETAEATRLKRTARRRYTRRKNRICYLQEIFSNEMAKVDDSFFHRLEESFLVEEDKKHERHPIFGNIVDEVAYHEKYPTIYHLRKKLADSTDKVDLRLIYLALAHMIKFRGHFLIEGDLNPDNSDVDKLFIQLVQTYNQLFEENPINASRVDAKAILSARLSKSRRLENLIAQLPGEKKNGLFGNLIALSLGLTPNFKSNFDLAEDAKLQLSKDTYDDDLDNLLAQIGDQYADLFLAAKNLSDATLLSDILRVNSEITKAPLSASMIKRYDEHHQDLTLLKALVRQQLPEKYKEIFFDQSKNGYAGYIDGGASQEEFYKFIKPILEKMDGTEELLAKLNREDLLRKQRTFDNGSIPYQIHLGELHAILRRQEDFYPFLKDNREKIEKILTFRIPYYVGPLARGNSRFAWMTRKSEETITPWNFEEVVDKGASAQSFIERMTNFDKNLPNEKVLPKHSLLYEYFTVYNELTKVKYVTEGMRKPAFLSGEQKKAIVDLLFKTNRKVTVKQLKEDYFKKIECFDSVEISGVEDRFNASLGTYHDLLKIIKDKDFLDNEENEDILEDIVLTLTLFEDREMIEERLKTYAHLFDDKVMKQLKRRRYTGWGRLSRKLINGIRDKQSGKTILDFLKSDGFANRNFMQLIHDDSLTFKEDIQKAQVSGQGDSLHEHIANLAGSPAIKKGILQTVKVVDELVKVMGRHKPENIVIEMARENQTTQKGQKNSRERMKRIEEGIKELGSDILKEYPVENTQLQNEKLYLYYLQNGRDMYVDQELDINRLSDYDVDAIVPQSFLKDDSIDNKVLTRSDKNRGKSDNVPSEEVVKKMKNYWRQLLNAKLITQRKFDNLTKAERGGLSELDKVGFIKRQLVETRQITKHVAQILDSRMNTKYDENDKLIREVRVITLKSKLVSDFRKDFQFYKVREINNYHHAHDAYLNAVVGTALIKKYPKLESEFVYGDYKVYDVRKMIAKSEQEIGKATAKYFFYSNIMNFFKTEITLANGEIRKRPLIETNGETGEIVWDKGRDFATVRKVLSMPQVNIVKKTEVQTGGFSKESILPKRNSDKLIARKKDWDPKKYGGFDSPTVAYSVLVVAKVEKGKSKKLKSVKELLGITIMERSSFEKDPIDFLEAKGYKEVRKDLIIKLPKYSLFELENGRKRMLASAGELQKGNELALPSKYVNFLYLASHYEKLKGSPEDNEQKQLFVEQHKHYLDEIIEQISEFSKRVILADANLDKVLSAYNKHRDKPIREQAENIIHLFTLTNLGAPAAFKYFDTTIDRKRYTSTKEVLDATLIHQSITGLYETRIDLSQLGGD

SEQ ID NO: 264 - protein, 1368 aa, synthetic construct
  REGION 1..1368: note = synthetic sequence
MDKKYSIGLAIGTNSVGWAVITDDYKVPSKKLKGLGNTDRHGIKKNLIGALLFDSGETAEATRLKRTARRRYTRRKNRICYLQEIFSNEMAKVDDSFFHRLEESFLVEEDKKHERHPIFGNIVDEVAYHEKYPTIYHLRKKLADSTDKVDLRLIYLALAHMIKFRGHFLIEGDLNPDNSDVDKLFIQLVQTYNQLFEENPINASRVDAKAILSARLSKSRRLENLIAQLPGEKKNGLFGNLIALSLGLTPNFKSNFDLAEDAKLQLSKDTYDDDLDNLLAQIGDQYADLFLAAKNLSDATLLSDILRVNSEITKAPLSASMIKRYDEHHQDLTLLKALVRQQLPEKYKEIFFDQSKNGYAGYIDGGASQEEFYKFIKPILEKMDGTEELLAKLNREDLLRKQRTFDNGSIPYQIHLGELHAILRRQEDFYPFLKDNREKIEKILTFRIPYYVGPLARGNSRFAWMTRKSEETITPWNFEEVVDKGASAQSFIERMTNFDKNLPNEKVLPKHSLLYEYFTVYNELTKVKYVTEGMRKPAFLSGEQKKAIVDLLFKTNRKVTVKQLKEDYFKKIECFDSVEISGVEDRFNASLGTYHDLLKIIKDKDFLDNEENEDILEDIVLTLTLFEDREMIEERLKTYAHLFDDKVMKQLKRRRYTGWGRLSRKLINGIRDKQSGKTILDFLKSDGFANRNFMQLIHDDSLTFKEDIQKAQVSGQGDSLHEHIANLAGSPAIKKGILQTVKVVDELVKVMGRHKPENIVIEMARENQTTQKGQKNSRERMKRIEEGIKELGSDILKEYPVENTQLQNEKLYLYYLQNGRDMYVDQELDINRLSDYDVDAIVPQSFLKDDSIDNKVLTRSDKNRGKSDNVPSEEVVKKMKNYWRQLLNAKLITQRKFDNLTKAERGGLSELDKVGFIKRQLVETRQITKHVAQILDSRMNTKYDENDKLIREVRVITLKSKLVSDFRKDFQFYKVREINNYHHAHDAYLNAVVGTALIKKYPKLESEFVYGDYKVYDVRKMIAKSEQEIGKATAKYFFYSNIMNFFKTEITLANGEIRKRPLIETNGETGEIVWDKGRDFATVRKVLSMPQVNIVKKTEVQTGGFSKESILPKRNSDKLIARKKDWDPKKYGGFDSPTVAYSVLVVAKVEKGKSKKLKSVKELLGITIMERSSFEKDPIDFLEAKGYKEVRKDLIIKLPKYSLFELENGRKRMLASAGELQKGNELALPSKYVNFLYLASHYEKLKGSPEDNEQKQLFVEQHKHYLDEIIEQISEFSKRVILADANLDKVLSAYNKHRDKPIREQAENIIHLFTLTNLGAPAAFKYFDTTIDRKRYTSTKEVLDATLIHQSITGLYETRIDLSQLGGD

SEQ ID NO: 265 - protein, 240 aa, Acetobacter aceti
MANIAENLVFGIDLGIGSCGWAVLNQKAKDENIVALGSWCFDVPETDKERIPTNQIRRANRLLRRVIRRRRNRMAEIRRLFASKGMLDTADPDALAKISADPWEMRAKGLDYQLTPQEFAVALGHIAKRRGFKSAAKRVSTNAPSEDSKMLAALEKTKEQSAQYRTIGEMFARDPAYADRRRNRDGCFDRTMSREDLFKETQILFESQRRLGNFSATSETEQAFIDIAFRQKPMQDSERL

SEQ ID NO: 266 - protein, 400 aa, Acetobacter aceti
SFERFRLLCRLVNLRVTDGLEDRPLTPEELRLACEDAGKTRKLSVKKVRSLIGLRDDQRFTTIPPDQEQHDIAARTGDALTGTATFRAILGESFWRQLLPHPEQLDRAAWIISFHELTDTIISKLATIGLPSEVMELIRKALEDGKFSKFKGAASLSDKAARKLIPFLQEGLTYDKACQKAGYNHAASKFTHYDSIDTKAKFNSLMDDVRDSITNPVARKAISEGMKQVWAMRNQWGLPGAICIELARDVGNSAEKRREIESGIKKNTAQRERERQEAKEHLNQSDISSETLLRYRLWKEQGGRCCYTDQPITPSQLIASDNSVQVDHILPWSRFGDDSYLNKALCTAKANQEKKNRTPWEWIHNQKGVEAWNHFTAAVESRKETRGLKKRNFLLKSSKE

SEQ ID NO: 267 - protein, 376 aa, Acetobacter aceti
YAARVMAEAVRLLYPSGNRAEKGGVKRVFTRPGALTAALRHAWGVESLKKINGKRLNDDRHHALDAAVVAAVSEKEIQKLTKSFQICEQKGLARPMRDVPMPWEGFRHQLETAYADIRVARPERRRARGKGHDATIRQLREEKDGPVVYERRAISDLKLTDLERIKDPERNSAIISSLRTWIEKGKPADYPPQSPKGDEIRKIRVMSRNKPAVSVRGGTADRGEMTRVDVFTKMGKKGKPEWFLVPIYRHQVIDRIQWPQPPNQAAANGKSEKNWPTMGLEHEFRFSLYPRSYVQIVKRDGEIIEGYFAGLDRTVAAFSLLSSSDPTSIQRGIGAKTLESIRKYNVNRFGDISMVEQETRTWHGDVCISPDQPDSA

SEQ ID NO: 268 - protein, 1054 aa, Actinobacillus suis
MKLTPLNYILGLDLGIASVGWAVVEIDEQENPLGLIDVGVRTFDRAEVPKTGESLALARRLARSARRLVKRRADRIKKAKRLLKAENILLSADEHLPNDVWQLRVKGLDQKLERQEWAAVLLHLLKHRGYLSQRKNESKSENKELGALLSGVETNHQILQSAEYRTPAEIAVKKFHVEDGHIRNQRGAYTHTFSRLDLLAEMELLFQRQTDLGNPHTSAKLLENLTALLMWQKPALAGEAILKMLGKCTFEPTEYKAAKNSYSAERFVWLTKLNNLRILEQGAERALTDNERFALLDQPYEKAKFTYAQARTMLALPDEAIFKGVRYQGEDKKAVETKTILMEMKAYHQIRKALENADLKAEWNELKNNSELLDDIGTAFSLHKTDEDICRYLDGKLSESILNALLENLNFDKFIQLSLKALQQILPLMLQGQRYDEAVSAIYGDHYGKKSAEINRLLPTIPADEIRNPVVLRTLTQARKVINAVVRLYGSPARIHIETGREVGKSYQDRKKLEKQQEDNRKQRESAVKKFKEYFPNFVGEPKGKDILKMRLYELQQAKCLYSGKSLELHRLLEKGYVEVDHALPFSRTWDDSFNNKVLVLANENQNKGNLTPYEWLDGKNNSEHWQNFVARVQTSGFSHTKKQRILSHKLDEKGFIERNLNDTRYVARFLCNFIADNMLLTGKGKRKVFASNGQITALLRGRWGLQKVRDDNDRHHALDAVVVACSTVVMQQKITRFVRYEEGNVFSGERIDRETGEIIPLHFPSPWAFFRENVEIRIFSENPKLELENRLPDYPQYNHEFVQPLFVSRMPTRKMTGQGHMETVKSAKRLDEGLSVLKVPLTQLKLSDLERMVNREREVTLYESLKARLEQFGNDPAKAFAEPFHKKGGAVVKAVRVEQTQKSGVLVRDGNGVADNASMVRVDVFTKGGKYFLVPIYTWQVAKGILPNKAVTANVDEIDWLEMDESYQFIFTMYPNDLVKVKLKKEEFFGYYGGLDRATGAIVIKEHDLEKSKGKQGIYRIGVKLALSFEKYQVDELGKNIRPCRPTKRQHVR

SEQ ID NO: 269 - protein, 239 aa, Actinobacillus ureae
MEIRIFSENPKLGLENRLPGYPQYNHEFVQPLFVSRMPTRKMTGKGHMETVKSAKRLDEGLSVLKVPLTQLKLSDLERMVNREREDALYQSLKAHLEQFGNDPAKAFAEPFHKKGGTVVKAVRVEQTQKSGVLVRDGNGVADNTSMVRVDVFTKAGKYFLVPIYKWQVAKRILPNKAVTAGVDEIDWLEMDSSYQFIFTMYANDLVKVKLKKRSILGLLRWFRSCNWGYCYQRTRFREI

SEQ ID NO: 270 - protein, 400 aa, Actinobacillus ureae
MKLTPLNYILGLDLGIASVGWAVVEIDEQENPLGLIDVGVRTFDRAEVAKTGESLALARRLARSSRRLVKRRADRIKKAKRLLKAENLLLSADEILPNDVWQLRVKGLDQKLERQEWAAVLLHILKHRGYLSQRKNESKSENKELGALLSGVATNHQLLQTAEYRTPAEITVKKFQAEENGHGHIRNQRGDYSHTFDRKDLLAEMKLLFQRQAELGNPHTSEKLLENLTTLLLWQKPALAGEAILKMLGKCTFEPAEYKAAKNSYSAERFVWLTKLNNLRILENGIERALTDNERFTLLDQPYEKAKLTYAQARTMLALSDEAIFKGVRYQGEDKKAAEKVALIEMKGYQHIRKALEGAGLKAEWNELKNNSELLDDIGTAFSLYFSISNLPTEIAYFTP

SEQ ID NO: 271 - protein, 1113 aa, Actinomyces georgiae
MSASSQNVERIRYKVGIDVGLRSIGFCAVQVDADDRPVKLLNTVVHVHDAGVSPADAKKADTRKLVSGVARRTRRLYRTRKRRLVDLDRQLDGLGWPLVDPARFADPREPWFAREKLVSGRVDDADERKELLSVALRHIAHHRGWRNPYSTVESLQADAPPSEFLQGLNQRVSEKLGTELDPGLTQGQLVAKLLHRFPNAKIRGPEGILRGKLHQSDNAGELRLICRTQGLDCHITEELVRLVFQAKSPKANKEMRKRIGRDQLPGQGAHIRAEKAHPVFQRFRIVAVLANLRIREAHVDRRLTAEEMRTLTDFLLGLAGSEQPTWEELADNLNIERHQLRGTAKASVDGAPALRFPPIDATTDRIYASKLKWLAEWWRQADEERRGYMVDALSNSGGSEDEPYLDDEIAEMLEQASEEDQAKLDSLHLPGGRASYCLDTLRRLTDAMLGGGLDLFEARKAVFHVDDDWAPPTDPIGAPVGNPPVDRVLKHVARWLEAATGRWGAPQTINIEHVREGLGSEKAARELTRMNDRRRRNNQKLVEEMGEKLGMSGRIRRSDRMRYEAIRRQNCECLYCGQPITYQTMEMDHIVPRAGAASTNSRSNLAAVCRRCNHQKGKLPFAVWAESQDSPAEVRLQDAVQRVRHWLRDAGMGQKELQALRVQVIARLKSKRPDEEFDGRSMESIAWMANELRARVEAQYRGSGTTVRVYRGALTAEARKASGFEGRVNLIGGRGKDRFDRRHHAMDALVIALMNQSVAQTLALRLNMRDSQWLTQSEQTWRQFHGAPGEAARKWEAWDRDMRDASDLFNLALDGGRIPITENVRLRVGNGRVHEDGVIRFKPEYEVKGKTIKGGEARLLGDSLPSEQIDRAETPALWTALTRLPEYDRKSGLPENPDRVIRVNGAVVQATDRIRFFGTPASVAVRGGYAKLGESIHHARIYRINGKTPKYAMIRVYTIDLMRLNHEDIFTAVLKPSTISMRCAEKKLKYAIAEGNAEQIGWLVEGDQLELDAAAYAKGVGADLMREYPMATCWRVAGFPDEAKLRLRPVLLAAEGMGEDAPKFMREVLENQGWRPAVNALLSPGSVRVVRRNVLGEPRFKSSGHLPTTVDLV

SEQ ID NO: 272 - protein, 1101 aa, Actinomyces naeslundii
MWYASLMSAHHLRVGIDVGTHSVGLATLRVDDHGTPIELLSALSHIHDSGVGKEGKKDHDTRKKLSGIARRARRLLHHRRTQLQQLDEVLRDLGFPIPTPGEFLDLNEQTDPYRVWRVRARLVEEKLPEELRGPAISMAVRHIARHRGWRNPYSKVESLLSPAEESPFMKALRERILATTGEVLDDGITPGQAMAQVALTHNISMRGPEGILGKLHQSDNANEIRKICARQGVSPDVCKQLLRAVFKADSPRGSAVSRVAPDPLPGQGSFRRAPKCDPEFQRFRIISIVANLRISETKGENRPLTADERRHVVTFLTEDSQADLTWVDVAEKLGVHRRDLRGTAVHTDDGERSAARPPIDATDRIMRQTKISSLKTWWEEADSEQRGAMIRYLYEDPTDSECAEIIAELPEEDQAKLDSLHLPAGRAAYSRESLTALSDHMLATTDDLHEARKRLFGVDDSWAPPAEAINAPVGNPSVDRTLKIVGRYLSAVESMWGTPEVIHVEHVRDGFTSERMADERDKANRRRYNDNQEAMKKIQRDYGKEGYISRGDIVRLDALELQGCACLYCGTTIGYHTCQLDHIVPQAGPGSNNRRGNLVAVCERCNRSKSNTPFAVWAQKCGIPHVGVKEAIGRVRGWRKQTPNTSSEDLTRLKKEVIARLRRTQEDPEIDERSMESVAWMANELHHRIAAAYPETTVMVYRGSITAAARKAAGIDSRINLIGEKGRKDRIDRRHHAVDASVVALMEASVAKTLAERSSLRGEQRLTGKEQTWKQYTGSTVGAREHFEMWRGHMLHLTELFNERLAEDKVYVTQNIRLRLSDGNAHTVNPSKLVSHRLGDGLTVQQIDRACTPALWCALTREKDFDEKNGLPAREDRAIRVHGHEIKSSDYIQVFSKRKKTDSDRDETPFGAIAVRGGFVEIGPSIHHARIYRVEGKKPVYAMLRVFTHDLLSQRHGDLFSAVIPPQSISMRCAEPKLRKAITTGNATYLGWVVVGDELEINVDSFTKYAIGRFLEDFPNTTRWRICGYDTNSKLTLKPIVLAAEGLENPSSAVNEIVELKGWRVAINVLTKVHPTVVRRDALGRPRYSSRSNLPTSWTIE

SEQ ID NO: 273 - protein, 1181 aa, Actinomyces sp.
MLHCIAVIRVPPSEEPGFFETHADSCALCHHGCMTYAANDKAIRYRVGIDVGLRSIGFCAVEVDDEDHPIRILNSVVHVHDAGTGGPGETESLRKRSGVAARARRRGRAEKQRLKKLDVLLEELGWGVSSNELLDSHAPWHIRKRLVSEYIEDETERRQCLSVAMAHIARHRGWRNSFSKVDTLLLEQAPSDRMQGLKERVEDRTGLQFSEEVTQGELVATLLEHDGDVTIRGFVRKGGKATKVHGVLEGKYMQSDLVAELRQICRTQRVSETTFEKLVLSIFHSKEPAPSAARQRERVGLDELQLALDPAAKQPRAERAHPAFQKFKVVATLANMRIREQSAGERSLTSEELNRVARYLLNHTESESPTWDDVARKLEVPRHRLRGSSRASLETGGGLTYPPVDDTTVRVMSAEVDWLADWWDCANDESRGHMIDAISNGCGSEPDDVEDEEVNELISSATAEDMLKLELLAKKLPSGRVAYSLKTLREVTAAILETGDDLSQAITRLYGVDPGWVPTPAPIEAPVGNPSVDRVLKQVARWLKFASKRWGVPQTVNIEHTREGLKSASLLEEERERWERFEARREIRQKEMYKRLGISGPFRRSDQVRYEILDLQDCACLYCGNEINFQTFEVDHIIPRVDASSDSRRTNLAAVCHSCNSAKGGLAFGQWVKRGDCPSGVSLENAIKRVRSWSKDRLGLTEKAMGKRKSEVISRLKTEMPYEEFDGRSMESVAWMAIELKKRIEGYFNSDRPEGCAAVQVNAYSGRLTACARRAAHVDKRVRLIRLKGDDGHHKNRFDRRNHAMDALVIALMTPAIARTIAVREDRREAQQLTRAFESWKNFLGSEERMQDRWESWIGDVEYACDRLNELIDADKIPVTENLRLRNSGKLHADQPESLKKARRGSKRPRPQRYVLGDALPADVINRVTDPGLWTALVRAPGFDSQLGLPADLNRGLKLRGKRISADFPIDYFPTDSPALAVQGGYVGLEFHHARLYRIIGPKEKVKYALLRVCAIDLCGIDCDDLFEVELKPSSISMRTADAKLKEAMGNGSAKQIGWLVLGDEIQIDPTKFPKQSIGKFLKECGPVSSWRVSALDTPSKITLKPRLLSNEPLLKTSRVGGHESDLVVAECVEKIMKKTGWVVEINALCQSGLIRVIRRNALGEVRTSPKSGLPISLNLR

SEQ ID NO: 274 - protein, 1120 aa, Actinomyces sp.
MNAMKQYNAGIDVGINSVGFAAIEVDSKGLPLNILNNMVVLHDSGVDPGTAKTGATRLANSGTARRTRKLIARRRKRLQKLDRYIEVQGWPLVDFSSLPDPYTPWKIRAKLTQDRLEGEEQGRGLSIALRHMARHRGWRNPYEGVESLHSPKEASKQFKDLKDRVTKVSGVIFDEDATPAEVVCDIGLSPKQRLRSAPSAKYKEGATLADEPVGGKSKEGLLGGKLMQSDNANELRKIGIVQGLSNEKVNEIIDQVFASESPKGQAGKRAKKDELPGQEQYVRALRAHLAFQRFRIVAAVANLRILEAEPKHERLLSQSEKDKVIEFLMSADGDDGVTWSDVAEELGIERECLSGTAKRGADGERPSSFPPTNSTNISIVRSKVKPLIEWWRKASDDEQATLVTALSNADELTDDQPSAETVRQFLSSPDEQSQEKIDKISLPKGRAAYSVNSLERLTRRMLKDSVDLFEARKREFGVDNNWTPTPDSIGEPVGNPAVDRVLKIVNRWLLAVTRKWGPPKVVNIEHVRVGFTSAAQTRKYEEENKTNRERNLAILEELRDKFGTSGKIRREDITRFAALRRQNCQCAYCGEAITFFDCEMDHIVPRKGPGSTNTRNNLVAICERCNKSKSNMPFSLWAQNCDIPGVSVEAVIDRVRTWIKDPELNPKQYNNFKKDVIERLRKTVDDDAIDNRSIESVAWMATELADRIGSHFRTAGANTKVRVYRGWLTSEARKASGFEGKINLIGGRGKTRLDRRHHAMDAATIALMRQSVAQTLVERASIRESDRLRRVVSSSWKDYRGADRDKQFSYGSWLNSMNALAELFNRAIDADGIPVTQNLRLRLGNGEAHDATIRSLEKKRVGASWTIGEIDRASTPQLWLALTRQEDFDQNDGLPANASRELRVKNHWFHAEENVTLFPTKSAAIAVRGGYAEIGNTIHHARLYKLPGKKLTYGMIRVFAIDLLCAWHTDLFSSPLLPESISLRTAETKVRRAVEDGAAMYIGWLVDGDEIVLDPETKAFKSNKIGEYLCEFPGTKRWKVDGFPDKEKLRLRPLQLAGEGLPEDVSAGTEEILGPKGNGWRVAINALFKSSQLVVVRRTALGMVRKLSRRHLPLTTRLRG

SEQ ID NO: 275 - protein, 1095 aa, Actinomyces sp.
MPAHHLRVGIDVGTHSVGLATLRVDDQGTPIELLSALSHIHDSGIGKEGQKDHDTRKKLSGVARRTRHLLRNRRERLQQLDKVLVDLGFPIPKPEEYPDLSERTDPYRVWRVRARLVEETLPEELRGPAISMAVRHIARHRGWRNPYSKVESLLSPAEESSFMKALRKRIMTKTGEVLDDDITPGQAMAQVALTHKIYMRGPEGILGKLHQSDNANEIRKICARQGISSDVCKQLLRAVFKAESPRGSAVSRVAPDPLPGQGSFRRAPKCDPEFQRFRIISIVANLRISETKGENRPLTVDERRQVVAFLMEDSQADLTWVDVAEKLRVSRQALRGTAMLTADGERSAAQPPIDVTDQIMRKTKISALKTWWDKADAERRGAMVRYLYEGLEDSECAEVIAKLPEKDHAKLDSLHLPAGRAAYSRESLTALSDHMLETTNDLHEARKRLFGVDDSWAPPAEPVGAPVGNPSVDRTLKIVARYLSAVESIWGTPEVIHVEHVRDGFTSERTAEERDKANRSRHNDNQKAIEKIQHDYGKEGYISRGDIVRFHALKLQGSACLYCGTTIGYHTCQLDHIVPQAGPGSNNRRGNLVAVCERCNHSKSNTPFAVWAQKCGIPHVGVKEAISRVNGWVEHNHSTSSGDLTRLKKEVIARLRRTQKDPEIDERSMESVAWMANELHHRIAAAYPETTVMVYRGSITAAARKAASIESRINLIGEKGRKDRLDRRHHAVDASVVALMEPSVAKTLAERSSLRGEQRLTGQEQTWKQYTGLTVGARERFEAWRGHMHRLTELFNESLAADEVYVTQNIRLRLSDGSAHTVKASKLVSHRLGDGLTVQQIDRACTPALWCALTREIDFDEKNGLPAREDRVIRVHGQEISSADCIQVFSKRKKTKSDRDEAPFGAIAVRGGFVEIGSSIHHARIYRIEGEKPAYAMLRVFTHDLLSQRHGDLFSAVIPPQSISMRCAATELRQAISEGRATYLGWIVSGDELHIPVETFTTHKIGSFLKDYPNTTRWRICGYDSETMLILKPRILSAEGLNNSSDIAEYVIKNKGWRVAINKLAKVHPTVVRRDALGRPRHSSRSNLPVTWSIE

SEQ ID NO: 276 - protein, 1144 aa, Actinomyces sp.
MSMIDSSENVPGIRYRVGIDVGLKSIGFCAVEVDRNDQPVRMLNSMVFIHDAGVDPNENKAAKSRKLTAGVARRTRRLYRTRHQRLVNLDRVLSKEFGWPLPDLTSFKDPREPWHVRAGLLEGYIADDEKRKEALSIALRHIARHRGWRNPYAKVETLLQPSEPSDFLKGLNDRISEELGRAFPADATPGQLVDTYLAHPDYVGRAGTPKLRGPQGILAGKLHQSDNAQEIRGICDVQRIEPAERDRLIRVVFEAKSPKGSAKERGLVGYDELPGQGRHVRAEKAHPAFQLFRMVSVLANLRIREGREERPLTPDELEDLVDFINQVSLKQEVTWQDLADKLRIERADLRGTAKASFDGSPVLRNPPTDVTTEKIMACKVKWLKEWWKEADDEQRGYMVDAFSNSGGSEDGTDVNDEVAELLEQATEDDQLEFEKISLPQGRAAYSLDSLRRLTDRMLRDGVDLHTARRLEFNVGDDWKPAVEPIGAPTGNPAVDRVLKQVSRWLHAATERWGEPTVINIEHARDGLGSERVARELMRENEKRRKANASAVAEMAAKLKLSGKVHRSDQIRYFALQRQNCQCLYCGAPITYTTAEMDHIVPRADGSSTNDRSNLAAVCRTCNHMKGKIPFAVWASSDKANQGVSLTGALERVNMWQRDSGMSPRQLKQLQREVCARLKSKKPDQEFDGRSMESVAWMAVELRTRIEGFYRSRDEESVPSVGVYRGQLTAEARRASGFESRVNLIGGRGKTRFDRRHHAMDALVIALMNPSVSRTLALRLNMRDAQRLTGVEETWKHFYGKPGEASKRFESWRESMLRGVELFNIALSDNAIPFVENIRLRVGSSVIHDATVHSFCPPKTPDGKQIITKGYGEQHSLGSAMPVELIDRAETPALWTALTRCPDFDPKKGLPENPQRTISVNGTRVGPTELVNFFEFSKSGPKACLKVRGGYVDLSGAIHHARIYRIAGKKTAYAMIRVFQVDLLRLKDHDVFTTPLKPSTISMRTAEPKIREALANGTATQIGWLVEGDELVIDTSKYSGGFIGEVLARYPEATSWRVAGFMTPAKLRIKPILLSKEGFVDETQAALLGVEVTSEAIQKTVDRPGWLPAVNVLFGAGGVRVIRRNCLGEERYHSSASLPVSMTLE

SEQ ID NO: 277 - protein, 1103 aa, Actinomyces sp.
MTKINDDLRYRVGIDVGLKSIGFCAVEVDENDQPLRLLNSMVFVHDAGVDPNENKAAKSRKLTAGVARRTQRGTAQNRRRLAELDRALSEELNWPLPNLEDFEDSYEPWHTRAELVEHYIKDDAERAEALAIAIRHIARHRGWRNPYLSVDSLLTPQEPSKFLRGLNERVTQALGREFPADATPGQLICAYIDSPKYAETQGIRGDSGILSGKLHQFDNVGEIRKICEVQRLDHDVFKLLVRKVFFAKSPRGSAAGLVGHDQIPGQGKYIRAEKAHPDFQLFRIVAVLTNLRIREGKAERCLTPDELRGLVDYILEVQLKQQVTWADLADNLGIERTDLRGTARASFDGSPALRFPPTDVTAEKIMASKVKWLKDWWDKADSERRGFMVDALSNSGGSTGDNDIDDEVAALLEAATEDEQAELEKIQLPQGRAAYSLDSLRRLTKRMLEEGVDLHTARKEEFNVDDDWRPEPEPIEAPVGNPAVDRVLKQVARWLNMATDRWGVPDVINIEHTRDGLGSEKVARELLRESQKRQDLNQKDMDKMIRELGISGKARRSSLIKYQAIQRQNSMCLYCGTEIGFETAEMDHIVPRALSGSTNDRSNLAAVCRACNHQKGAVPFAVWATSGEAHAGVSLEDAIKRVRLWQKGPGMSPKQHKAFQNEVISRLKSRKPDEEFDGRSMESVAWMAVELRTRIDGYYRKVNSDSVPKVGIYRGQLTAEARKASGFENRVNLIGGKGKTRFDRRHHAMDALVIAMMNQSVSQTLALRVNMRESQRITGQEETWKNFYGKPGQASERFEKWREGMLRAVELFNIELAKNAIPFHENVRLRVGSSKVHDDTVRKFIHAKLGEALSVAMIDCAETPALWTALTRLPDFDPKDGLPEDLSREIYIHSRKITADEQLNFFNSPSACLKVRGGYVEIGSSIHHARVYRIDGKKTTYSMVRVFATDLVKMTHEDVFTTPLKPSTISMRTADPKIRKALADGTATQIGWLVEGDELQLETDKYSGGLIGEVLAEYPQLTSWRVAGFYGVTQLRLRPYMLAAEGIPSDASESLRKVIEGKGWLPAINALLSSGCVKVVRRNCLGEPRFNAKSSLPVSQLLR

SEQ ID NO: 278 - protein, 1114 aa, Actinomyces turicensis
MQFHFYMVYVTMKGMNDKDASQQLRYRVGIDVGTHSIGFCAVEVDESGMPIQLLNSMVHKHDSGIDPGGNDTATTRLAEAGVARRTRRLIRRRKKRLQELDAFIEECGWPLVDLATITDARSPWRIRAHLATEHIDDEAEQGKLLSIALRHMARHRGWRSPYARISSLHIQADPSEQLKALAQRVSEKTGISLTADQTPAQLISVYLDVFETGKLRGPEGILGGKLMQSDNANELRRIATVQGLDNDLLKKIIGFVFAAESPKGSAAKRVGKDVLPGAHGLRAEKAHPAFQQFRIVSIVQNLRIKEGTGLRALTSEETEIVVDFLNQAGLTEAPTWEEVADNLEIPRSHLKGTATEGFDGIAPSTRPPFDVTSQKILNGKLKKLSAWWKDADYDHRCAMVNALSNVGSDDEGSLADDDVREFLSDFTDEELEALDKVELPGGRAAYSVDSLEKLTNTMLSEGCDLHSARKIAFGVDDSWTPPAEPIGQPVGNPAVDRVLKQVARWISAATNQWGTPESVNIEHVRDALGSEKASREYQRSLQTRRIRNEKLFAEMRERLDIGGKPRRSELTRYLALQRQNCQCLYCGMPITYTDAEMDHIVPRKGAASTNTRENFAAVCRACNHQKSNLPFAVWAEKTERPGVSVKEAYKRVSDMRIEPGMNGRQMNEFRKAIRLRLTTKHADAEIDGRSLESVAWMANELRHRIEGFYRSAENDVTVRVFRGAVTAEGRRASGFESRVNLIGGKGKTRLDRRHHAMDALTIALMEPGIAQTIALRMNMRESQRVLGEQETWKSFTGGSDTARKRWEHWCEEMLRASELFNVFLAEDRIPICQNKRLRLGSSAVHKAIVQPFEASDKRIVSDAMPVELIDRASTPALWTALTRDPDFDPKEGLPANPSRTIRLHDKRLGPNETVEFFPTAAACLAIRGGYCEIGAGIHHARIFRISGKKTTYAMLRVYQCDLVRFQKENLLTVELPANTISVRTAVPKLREALAHGTAEQIGWLVVGDELKIDLSGFTTGQIETFNETYPQATRWEVTGFPTKTQLRLKPLLIASEGLADDVPDDIVKIVKGPGWWPAIDKLLKIGNVVLYRRDTHGKPRVVSHRSLPLSSKLQ

SEQ ID NO: 279 - protein, 1113 aa, Alcanivorax sp.
MRYRVGLDLGTASVGAAVFSMDEQGNPMELIWHYERLFSEPLVPDMGQLKPKKAARRLARQQRRQIDRRASRLRRIAIVSRRLGIAPGRNDSGVHGNDVPTLRAMAVNERIELGQLRAVLLRMGKKRGYGGTFKAVRKVGEAGEVASGASRLEEEMVALASVQNKDSVTVGEYLAARVEHGLPSKLKVAANNEYYAPEYALFRQYLGLPAIKGRPDCLPNMYALRHQIEHEFERIWATQSQFHDVMKDHGVKEEIRNAIFFQRPLKSPADKVGRCSLQTNLPRAPRAQIAAQNFRIEKQMADLRWGMGRRAEMLNDHQKAVIRELLNQQKELSFRKIYKELERAGCPGPEGKGLNMDRAALGGRDDLSGNTTLAAWRKLGLEDRWQELDEVTQIQVINFLADLGSPEQLDTDDWSCRFMGKNGRPRNFSDEFVAFMNELRMTDGFDRLSKMGFEGGRSSYSIKALKALTEWMIAPHWRETPETHRVDEEAAIRECYPESLATPAQGGRQSKLEPPPLTGNEVVDVALRQVRHTINMMIDDLGSVPAQIVVEMAREMKGGVTRRNDIEKQNKRFASERKKAAQSIEENGKTPTPARILRYQLWIEQGHQCPYCESNISLEQALSGAYTNFEHILPRTLTQIGRKRSELVLAHRECNDEKGNRTPYQAFGHDDRRWRIVEQRANALPKKSSRKTRLLLLKDFEGEALTDESIDEFADRQLHESSWLAKVTTQWLSSLGSDVYVSRGSLTAELRRRWGLDTVIPQVRFESGMPVVDEEGAEITPEEFEKFRLQWEGHRVTREMRTDRRPDKRIDHRHHLVDAIVTALTSRSLYQQYAKAWKVADEKQRHGRVDVKVELPMPILTIRDIALEAVRSVRISHKPDRYPDGRFFEATAYGIAQRLDERSGEKVDWLVSRKSLTDLAPEKKSIDVDKVRANISRIVGEAIRLHISNIFEKRVSKGMTPQQALREPIEFQGNILRKVRCFYSKADDCVRIEHSSRRGHHYKMLLNDGFAYMEVPCKEGILYGVPNLVRPSEAVGIKRAPESGDFIRFYKGDTVKNIKTGRVYTIKQILGDGGGKLILTPVTETKPADLLSAKWGRLKVGGRNIHLLRLCAE

SEQ ID NO: 280 - protein, 1146 aa, Alicyclobacillus hesperidum
MAYRLGLDIGITSVGWAVVALEKDESGLKPVRIQDLGVRIFDKAEDSKTGASLALPRREARSARRRTRRRRHRLWRVKRLLEQHGILSMEQIEALYAQRTSSPDVYALRVAGLDRCLIAEEIARVLIHIAHRRGFQSNRKSEIKDSDAGKLLKAVQENENLMQSKGYRTVAEMLVSEATKTDAEGKLVHGKKHGYVSNVRNKAGEYRHTVSRQAIVDEVRKIFAAQRALGNDVMSEELEDSYLKILCSQRNFDDGPGGDSPYGHGSVSPDGVRQSIYERMVGSCTFETGEKRAPRSSYSFERFQLLTKVVNLRIYRQQEDGGRYPCELTQTERARVIDCAYEQTKITYGKLRKLLDMKDTESFAGLTYGLNRSRNKTEDTVFVEMKFYHEVRKALQRAGVFIQDLSIETLDQIGWILSVWKSDDNRRKKLSTLGLSDNVIEELLPLNGSKFGHLSLKAIRKILPFLEDGYSYDVACELAGYQFQGKTEYVKQRLLPPLGEGEVTNPVVRRALSQAIKVVNAVIRKHGSPESIHIELARELSKNLDERRKIEKAQKENQKNNEQIKDEIREILGSAHVTGRDIVKYKLFKQQQEFCMYSGEKLDVTRLFEPGYAEVDHIIPYGISFDDSYDNKVLVKTEQNRQKGNRTPLEYLRDKPEQKAKFIALVESIPLSQKKKNHLLMDKRAIDLEQEGFRERNLSDTRYITRALMNHIQAWLLFDETASTRSKRVVCVNGAVTAYMRARWGLTKDRDAGDKHHAADAVVVACIGDSLIQRVTKYDKFKRNALADRNRYVQQVSKSEGITQYVDKETGEVFTWESFDERKFLPNEPLEPWPFFRDELLARLSDDPSKNIRAIGLLTYSETEQIDPIFVSRMPTRKVTGAAHKETIRSPRIVKVDDNKGTEIQVVVSKVALTELKLTKDGEIKDYFRPEDDPRLYNTLRERLVQFGGDAKAAFKEPVYKISKDGSVRTPVRKVKIQEKLTLGVPVHGGRGIAENGGMVRIDVFAKGGKYYFVPIYVADVLKRELPNRLATAHKPYSEWRVVDDSYQFKFSLYPNDAVMIKPSREVDITYKDRKEPVGCRIMYFVSANIASASISLRTHDNSGELEGLGIQGLEVFEKYVVGPLGDTHPVYKERRMPFRVERKMN

SEQ ID NO: 281 - protein, 1552 aa, Anaerophaga sp.
MFSQRNNPYCELLQNVKQLYKEKFGKTNQVDNSIIYGFMKRILGLDLGTNSIGWALVENDENDRKGKIIGMGSRIIPMDMSELDNFNKGASISKTAERTRLRMTRRLRERHLLRRARLHRILNIMGFLPEHYRNSIDFIDKKGCFFEGQEPKIAYKPDKNSEQFCFLFTSSFHEMLEDFRKFQPELIQNRKKVPYDWTIYYLRKKALTQKISKEELAWIILNFNTKRGYYHLRGEDEDNQDNKKIKEFRALKVVNVTEREGANSSGKKWYDMELENGWVYSRQSNLPPNLEGKTIELIVSYTLDNNGNIKKDKNGKEKYSLSMPGEEDWNLVKIKTENDLKTSKKSVGEYIYDHLLKNPDQKIRGKLISTIERKFYKEELSRILKTQMNFYEELKNRELYQKCVEELYPNNKSHQQTLLQKDFIHLIVEDIIFYQRPLKSKRAFVNNCPLEYRVYVDKKSGELIKSGVKCIPKSHPLFQEFRLWQYVRNLRIYERERMVNGRLMVNVDVTNELLPDEEHIVRLFDLLNDRKSFKQDDVLRFVGIKSPKDRKRYSWNYPEDKELPGNETRHLILAWLKKVDGVPEDWLDPEKLKALWHLLYSVTDREEIIKGLHSFAKKYELPDTFVEHFKKIPRLEREYGSFSEKAIKKLLPLMRMGKYWKAEEIPADLLEKAQKIIDAEADDRISDEVREKLLHLKDISQLKGLPLWQASYLVYGRHSETGEVVKWRTSEDLEKYILQFKQHSLRNPVVEQVILEALRVVKDIWEHYGEGKEGFFNEIHVEIGRELKNPADKRKKITSQIQENENTNLRIKALLEELFNDPSVKNVRPYSPAQQEILRIYEDGVLNGQKEIPDDILKISKMARPSKSQLVKYKLWLEQKYRSPYTGEIIPLSQLFTSAYEIEHIIPQARYFDDSFSNKVICEAEVNREKGHQLAFEFITKRGGDEIELNFGKKVTILNVEEYQKFVKDHYGRSLRSLSKMRKLLMEDIPDDFIDRQLNDSRYISKVVRNLLSNIVRAEDENSLVSKHLITCTGGVTTRLKHEWGLNDVWNELITPRFVRLNKMGKEKFGEWINKKGKQVFQIQMPLELQKGFNKKRIDHRHHALDALVVACASRSHVNYLNNDSARANASETRYDLRNKLCYKDKTDSNGNYRWKFYKPWESFTEEAKNRLAGTVVSFKSNRRIMTRSSNRYFKWVDTSEGKKKKLVRQIKGDNQAIRKPLHKDTVLGKVSLRKEKKVSLSKAIDLWESIVDKPLKKRIQSLREQGYDKKLLLKYFKDRNNQFNGQDISRVNIYFFDNNLAARRVTLDASFNSEKRIDGITDSGIKKILYAHLQNEKYHGKKDEKGNEISPYELAFSPEGLEEMNANIKKLNGGKPHCPIYKVRLAETIGEKFKLGEKGNKNKKYVEAAKGTNLFFAVYVDEKGVRSFETIPFSVALERRKQKLAVVPEENENKEKLLFYLSPNDLVYVPDEDEKLIDYRQLSINPTRIYKMVSSSGTQCFFIPHFVASPIVQTMELGPNNKSERAWDGQMIKNVCYKLSVDRLGNVKIEK

SEQ ID NO: 282 - protein, 1515 aa, Anaerophaga thermohalophila
MKRILGLDLGTNSIGWALVESDEEQKSGKIQGIGSRIIPMDQNELDNFNKGNTVSQTAERTRLRMVRRLRERHLLRRERLHRVLKEIGFLPEHYLEQIDFTEKPGGFLPGKEPKIAYKPDNFKDKYDFLFQDSYHEMLSDFQDKNPEFIQKRKKVPQDWTIYYLRKKALTAKITKEELAWIILNFNQKRGYYQLRGEDEDVAKNTKKEEFHALKVVKVKEREDSEGASGKWYDIELENGWVYPRQSNIRPDWEGKILELIVTYNLDKDGNIKTDKEGNEKRSFRMPNKDDWTLRKKRTENEIEKSGKTVGEYIYDNLLDAPDLKIRGKLVSTIERKYYRSELEQILTAQKKYHPELSNSELFNKCISNLYPNNDIHRKALLSKDFVHLIINDIIFYQRPLKSKRSTVSNCPLEYRVYVDKVTGEKKKVPLKCIPKSHPLYQEFRLWQYVKNLRLFEKERFENGRLLTNVDVTEQFLPDEDKYVELFEFLNGRKTFKQDDILKFAGIKSAKDRVKYYWNYPQEKEYPGNETRYLIESRLKKIENVPDEWLNYEKIEELWHLLYSVTDKVEIEKGLQSFAAKYQLPDLFVEVFKGFPRMEREYGAFSKKAIKKLLPLMRMGKYWKLENINPDLIEKVQKIIDGEADDNINDGIRERFSEINEMSDLRGMPLWKASYLVYGRHSEAAEVIRWRTSADLDQYIKDFKQHALRNPIVEQVVLEALRVVKDVWNYFGEGREKFFDEIHVEIGRDLKNPADKRQKIANQIQENENTNLRIKALLVELFNDPEVQNVRPYSPVQQQLLKIYEDGVLNAERDIPDDIQKISRMANPTRNQLIRYKLWLEQKYRSPYTGEIIPLNKLFTSEYEVEHIIPRARYFDDSFSNKIISEAEVNRKKDRMLAFEFIKKLGGSTIDLNYGKKVSVLTVEEYQQFVKDHYGINPHSRLKMQKLLMDEIPESFIERQLNDSRYISKMVRNLLSNIVREENENSPVAKQLITCSGSITNTLKQEWGLNDVWNTIITPRFERLNKMGEQKYGEWVNKEGKPVFQIQMPLELQKGFNKKRIDHRHHALDALIVASATRSHVNYLSNEAAKTNAKDTRFDLRNRLCYKEKRGQNRNFTWRFYKPWNTFTEDAKNALNDIVVSFKSNHRVINKSTNRYFKWENLPGGMKKKRLVRQEKGDNWAIRQSLHKDTVLGKVSLRKVKPVSLSVALDSWNNIVDKALKKKIRSLKDQGYDKKLMLKYFKDRRNEYNGENISRVNVYYFDEEMAARRVDLDTSFNSEKRIEGITDSGIKKIIYAHLKNEKYHGQKDDKGKDISPYELAFSPEGIAEMNANIKQLNGGKPHCPIYKVRLAEPVGEKFQLGETGNKTEKLVEVAKGTNLFFGVYANDEGVRSFATVPFYLAVEREKQGLPAVPQENENGDQLLFWLSPNDLVYVPSEEDAHFANPKQIELDNSRIYKMVSSTGTQCFFIPHFVATPIVQTIELGPNNKSERAWDGQMIKKVCYKLSVDRLGNVEIE

SEQ ID NO: 283 - protein, 333 aa, Bacillus cereus
MMNPNNFTKEDFWRTIILYGLNQATYKIALGQSLIRFSEQQRNVVSMNELAEDFFDMYLERLKNGKPQLATPNRQTAMERIINSYNIGRLTRSQAIEKVEREAFNDVIDRFHTVDSLQVPMKFYEKTDKGIVIFDNVFEIFSDNNNFELRNELDARWDLLESAFEIKRTDSQLVNDIRKLYLANGYERTDITKNRSVLNGYQSNVCFYCGELMSDDDVHVDHVIPRQLINHDDIWNLVLSHGFCNQQKSDNLPDVNYIEKLIERNEYFIKSNHPISNKLKERLGNTPRRRRTTIDRIYEHAKLVLAPWKGIYGYNPATDPFYKTFIRNIVLSK

SEQ ID NO: 284 - protein, 1068 aa, Bacillus cereus
MRYVLGLDIGIASCGWAVINQEKERIEDLGVRIFDKAENPKDGKSLAAPRRDARSTRRTLRRKKHRMQRIKILLVKQGLLFKTELNHLYESATEFDVWNLRLDALERKLHPKEFARVLIHLAKRRGFKSNRKETTLSENGQILESISENQQIMEQQNYRTVGEMILKDKKFENHKRNKDGTYIGTVTRQQLQDEIQMIFHTQRLYKNDYATEEFESSYLEIWASQRPYASKDQIEKMIGYCTLEPKEKRTPKASWSFQYFVALQTINNLRLISKDKIEELSFEEKKQIMNLALEKPIVKYIDIRKLLSIPNDFQFNSLSYSADTVDTTLENKRCIELKEYHSINKVYKQVYGKNTPNLLPIDYDTIAYGLTIFKDDKDILEYLQNKYVNAKGKPIKNLAKKTYDDTFIQALLNLNFTKMGHLSFKALKNIIPFLEEGLSYDKACEKAGYNFKGTSYTERTKYLPVIPQNTNPVVHRALSQTRKVINAIIKKYGSPNAIHIETARELSKTFQERKEIDSRYQDNSKKNEHAIHKLKELGNINPSGINIVKFKLWSEQDGRCMYSGKYIEPHRLFEEGYTEVDHILPYSRSLDDSYNNKILTLGTENQRKGNKTPYEYMGNTSIWDEFETRVQSNKKINFKKQQKLLLQNFSYAREQEFIERNLNDTRYATIYLTSLIQQHLIFSESSSKKKVRTVSGIITSHLRSRWGFNKDRKEGHIHHALDAVIVAVTSNHMIQRVTKYYKLKELNKNLQAKQLPFPEPWEGFRLELEARISPNTQQYLKGIHFKNYADVNLSDIKPIFVSRMPKRSITGELHQETIRKFLGYNEKGKVLTAIKTKLEDIPFDANGDFPMYGKETDLYTYNAIKERYLSHEKDKRKSFQEPLYKPTKSGEIGPLIKSIKIMDTRTIVNPVNQGKGVVYNSKIARTDVFKKEDKYYLIPIYTIDLLKNILPHKAITAGKGYEDWTTIDSSFTFLFSLFPNDLIQIVPSKNKTIKARTTVSKKEILLPSLTGYFKGVHSGTAGITVETHDGSVIANVGSKQLLLFEKYQVDVLGHYTKIKEEKRMGMAI

SEQ ID NO: 285 - protein, 1078 aa, Bacillus cereus
MRYVLGLDIGIASCGWAVINQEKERIEDLGVRIFDKAENPKDGKSLAAPRRDARSTRRTLRRKKHRMQRIKVLLVKHGLLSKTELDHLYESATEVDVWNLRLDALERKLYPKEFARILIHLAKRRGFKSNRKETTLSENGQILESISENQQIMEKQNYRTVGEMILKDKKFENHKRNKNGTYVGTVTRQQLQDEIQMIFHAQRLYKNDYATEEFESSYLEIWASQRPYASKDQIEKMIGYCTLEPKEKRAPKASWSFQYFVALQTINNLRLISKDRIEELSFEEKKQIMNLALEKSIVKYIDIRKLLSVPNEFQFNSLSYSADTVDTAVESRKCIELKEYHSINKVYKQIYGENALNLLPKYYDTIAYGLTIFKDDKDILEYLQNKYVNAKGKPISNFANKTYDDTFIQALLNLNFTKMGHLSFKALKNIIPFLEEGLSYDKACEKAGYNFKGTSYTEQTKYLPVIPQNTNPVVHRALSQTRKVINAIIKKYGSPNAIHIETARELSKTFQERKEIDSMYQDNSKKNEHAIHKLKELGNINPSGINIVKFKLWNEQDGRCMYSGKYIEPHRLFEEGYTEVDHILPYSRSLDDSYNNKTLTLGTENQRKGNKIPYEYMGNTSIWNDFETRVQSNKKINKKKQQKLLLQHFSYAREQEFIERNLNDTRYATIYLSSLIQQHLIFSESSRKKKVHTVSGIITSHLRSRWGFNKDRKEGHIHHALDAVIVAVTSDHMIQRVTKYYKLKELNRNLQAKRMPFPEPWEGFRLELEARISPNTQQYLKGLRFKNYADVNLSEIKSIFVSRMPKHSITGELHQETIRKFIGYNEKGKVLTAIKTKLEDIPFDANGDFPMYGKESDLYTYNAIKERYLSHKKDKRKSFQEPLYKPTKSGGIGPLIKSIKIMDTRTIVNPVNQGKGVVYNSKIARTDVFKKEEKYYLIPIYTIDLMKNILPQKAITAGKGYEDWTTIDPSFTFLFSLFPNDLIQIVPSKNKTIKARTTVSKKEVLLPSLTGYFKGVHSGTAGITVETHDGSVIANVGSKQLLLIEKYQVDVLGNYTKIKEEKRIGLTTYNDNKKIAAC

SEQ ID NO: 286 - protein, 1088 aa, Bacillus smithii
MNYKMGLDIGIASVGWAVINLDLKRIEDLGVRIFDKAEHPQNGESLALPRRIARSARRRLRRRKHRLERIRRLLVSENVLTKEEMNLLFKQKKQIDVWQLRVDALERKLNNDELARVLLHLAKRRGFKSNRKSERNSKESSEFLKNIEENQSILAQYRSVGEMIVKDSKFAYHKRNKLDSYSNMIARDDLEREIKLIFEKQREFNNPVCTERLEEKYLNIWSSQRPFASKEDIEKKVGFCTFEPKEKRAPKATYTFQSFIVWEHINKLRLVSPDETRALTEIERNLLYKQAFSKNKMTYYDIRKLLNLSDDIHFKGLLYDPKSSLKQIENIRFLELDSYHKIRKCIENVYGKDGIRMFNETDIDTFGYALTIFKDDEDIVAYLQNEYITKNGKRVSNLANKVYDKSLIDELLNLSFSKFAHLSMKAIRNILPYMEQGEIYSKACELAGYNFTGPKKKEKALLLPVIPNIANPVVMRALTQSRKVVNAIIKKYGSPVSIHIELARDLSHSFDERKKIQKDQTENRKKNETAIKQLIEYELTKNPTGLDIVKFKLWSEQQGRCMYSLKPIELERLLEPGYVEVDHILPYSRSLDDSYANKVLVLTKENREKGNHTPVEYLGLGSERWKKFEKFVLANKQFSKKKKQNLLRLRYEETEEKEFKERNLNDTRYISKFFANFIKEHLKFADGDGGQKVYTINGKITAHLRSRWDFNKNREESDLHHAVDAVIVACATQGMIKKITEFYKAREQNKESAKKKEPIFPQPWPHFADELKARLSKFPQESIEAFALGNYDRKKLESLRPVFVSRMPKRSVTGAAHQETLRRCVGIDEQSGKIQTAVKTKLSDIKLDKDGHFPMYQKESDPRTYEAIRQRLLEHNNDPKKAFQEPLYKPKKNGEPGPVIRTVKIIDTKNKVVHLDGSKTVAYNSNIVRTDVFEKDGKYYCVPVYTMDIMKGTLPNKAIEANKPYSEWKEMTEEYTFQFSLFPNDLVRIVLPREKTIKTSTNEEIIIKDIFAYYKTIDSATGGLELISHDRNFSLRGVGSKTLKRFEKYQVDVLGNIHKVKGEKRVGLAAPTNQKKGKTVDSLQSVSD

SEQ ID NO: 287 - protein, 1069 aa, Bacillus thuringiensis
MNYDIGLRIGITSCGWSIINKDLERIEDLGVRVFEKAENPDGTASAAPRREARKSRRKHRRKKHRIERIKRLIVQHDLLSKKELDSLYLSPFNIDVWNLRVEALERKLDNREFARVLIHLVQRRGFQTIRKSVEIQEEGKLLENVSENERIMKVNGYKTVGEMFSKHEKFTHHKRNKDGSYTSVVTRSLLLKEIKTIFNSQRILGNVFSTQKLESDYLYIWGSQRPTLTYEQLMSMVGNCIYEKKEKRAPKTSWAFQYFSLLQKINKLKVSDDNTLRKLSKEERDIVIELAFKKKNVSFVDIRKALKLNDNTKFNHLTYSHVVETKKVEKATFIELKGYHLIKKQLKDRNVELTQELQPKDYDAIAAASTFFKNDIEFRDYLRNQYLDSNGKRKSNIANKVFEDKVIAAVFELNFSKVCHLSFKSLYKLIPHLEKGLDYKEAILCAGYNFRDENKRDKKLFLPVIQQETNPVVHRALTQARKVINAIIREYGSPNTIRFVVANDLAKTYKQRKELESTLKKNRAENEKIKTKLLSMGIINPTGMDIVKYKLWYEQSGICLYTGRQMELSSLFKPGYSIVNHIIPYNRSFDDTYHNRVLTLTETKYEKGNKIPFEYFGAEETCWNEYEKRVSTSKKIHDKKREKLLIRNFDIEYENEMISNNVFDTHYIGSYFEKYIDEHLQFKKSTKKQKVFSIHGNMVAHLHSRWGFNKNSREIYLNHAVDAAIVAVLTDQLIRNIADYYRRDNILEQKGSLKFPEPWKSFSIELEARISPQVRDLIKKLNLDSYLDVDILHIKPVFISKKPRRKVNGEAHKSTIRSLIGINEIGKTVTCIKTRLEDIPFDENGDFPMYGKDTDKYTYTAIKERYLEFNKDKEKAFSTPLYKLKRNGEPGNQIKSVKIIDTRNIVNKVNQGKGIAYNSNIIRVDVFSRDQKYYVVPIYLRDFIKGSLPNKIITAAKGFMQWPETDNSYTFLFSIFPNDLIKVVPKEGKFIKAKNENKENINLTEILGYFKGLDSSTGAFTLESHDGSLLARGIGTKNLLLIEKYQVDVLGRYNKVGNEERQDIKIQQN

SEQ ID NO: 288 - protein, 206 aa, Bacteroides cellulosilyticus
MKKILGLDLGCNSIGWALVNEAENTEEISSIIKLGVRVNPLTVDEMQNFEKGKSITTNADRTLKRSMRRNLQRYKLRRDTLIEVLKEHGFITDSTLLSEHGNKTTFETYRLRAKAAVEEISLEKFARVLLMINKKRGYKSSRKAKGSEDGVLIDGMDVARKLYEEGLTPGELCLQILEAGKKNLPDFYRSDLQNEFDRIWNFQKLV

SEQ ID NO: 289 - protein, 349 aa, Bacteroides coprosuis
MKKILGLDIGTNSVGWAVVNTNQEGEPSQIEKLGSRIIPMSQDILDKFGQGQTVSSTASRTDYRGIRRLRERSLLRRERLHRVLHILDFLPKHYADSIGWDPRNSKTYGKFLPGTEVKLAWVPTADGHQFLFYSTYLEMLEDLKQTQAQLFETSQTPVPLDWTIYYLRKKALTQPITKHELAWLLLHFNTKRGYYQRRGELEDTPTDKLVEYHALKVVDVEVDPEDQSKKPWYFVHLENGWIYKRQSSEPLDNWKGLVKEFIVTTHLDKEGKPKLDKEGEVRRSFSSPKEDDWTLVKKKTENDLEKSGLTVGAYIYQTLLNKPNQKIRGGLIKHIERNYYVEELEQILR

SEQ ID NO: 290 - protein, 1504 aa, Bacteroides coprosuis
MKKVLGLDIGTNSVGWAVVNQNDKGEFLSIEKIGSRIIPMSQDVMDKFGAGQTESSTAQRTQYRGVRRLRERSLLRRERLHRVLHILHFLPQHYDAAIGWNKKENKTYGKFLPGVEVNIPWVATDQGHQFIFMDSYAEMLKDLKQHQPHLFEKSSTPVPLDWTIYYLRKKALTQAISKEELAWILLNFNQKRGYYQLRGEEVEDNTKREEFYALKVVKVELDKDNTSAKTWYKVHLENGFIYPCPSDTPIDSWVGMVKDFIVTTTLEKDGSEKRTADGEIKRSFRAPKEDDWTLLKKKTESELEKSGKQVGAFIYDTLLSNPDQKIIGGLIKTIERKYYKKELEQILETQQKFIAELSDKKLFQACAEELYPLNDSHRENLLERDFKHLFVQDIIFYHRPLKTKKSLISNCTYEYRTFYKNGEKQISPIKCIAKSNPLFQEFRVWQFVQNLRILQRQRSEGDSIKYNVDVTAEFLKDENDIANLFTWLNERKVIKQDQLLKSYFKLKVNKETKELDYRWNYVDDKNKEYPCNATRTHILSFLEKCKEEKRIEDDRFVYSLWHLLYSVVEPIELRGALAKFAEREHLHPSFVDVFAQFPPLEKEYGSYSEKAIKRLLPLMRMGDYWHEDKIDVKTKQRIQRIIDGEADDDITHRSREKVENLRSITDFKGLPLWKAGYVVYNRHSESGELTKWKTPHELSNYIQNEFKQYSLRNPIVEQIVLETLRVVHDLWVKHGDFSEIHLELGRDIKNSSDKRKRMAERQQENENSRQRVLEMLIDLKKEAAFADLNPYSPSQQEKLRIVEDGVLRSNIEIPKDIEKITKSAKPTSRELTKYRLWLDQKYRSPYTGQPISLAQLFTSKYEIEHVIPQAKYFDDSFTNKVICESEVNKEKGSMLAHEFILKNGGSTVNVGGRQVQVLKNDAYVELINRLYGKNNPVKAKKLLAEDIDEVVGDFSERQLNDTRYISRVVQKLLSNIVREEDEQESTSKHVIGCSGQVTTALKKDWGLNDIWNKIIQPRFERLNEMTATEDYGVWQSPNHFQIRVPEEIQKGFTKKRIDHRHHAMDALVIACATRSHINYISNRSGQDRNAKFETTRTDLRSKLCYKENSSGNNYNYIFNKPWDTFTQDAHRALENIVVSHKQNLRVLTKTNNYTQFINKDGKKDLQKQVKGDHFAVRKPMHQETIYGRVSIRSIKEVALKKALENWKQIVDRTLKDKIRELIGAYGKYDAQTILKYFKDRDYKFNNLKINRVEVYEYDHNCAAVRKSIGDDLTIKQIERITDESIRKILMNHLSNYDDNLKEAFSPEGLMEMNKNIKELNGGKNHQPIYKVRLFEDLGSKFPLGVSHNNPDKYAIAAKGTNLFFGIYEDQEGKRMFDSIPLNIVIDRLKEKKSPVPETYNESKLKFHLSPNDLVYVPTDEEQKQPELVDVDHLSDEQKGRVYKAVSFTGNRAFFVNHRVSKVIHDYVEFGTKNKIENDDDKRSLKHICWKLKVNRLGEITDVKR

SEQ ID NO: 291 - protein, 1509 aa, Bacteroides eggerthii
MKTILGLDLGTNSVGWAVINSVIKEQAERIWIEMAGSRIIPMDAAVLGDFDKGNSISQTSERTRLRGARRLRERQLLRRERLHKVLNILGFLPNHYLEYIDFEKHPGKFLADAEPKLAWVKDEQGKYTFLFQAAFDEMLADFAIHQPSLVSGDKKIPYDWTIYYLRKKALTEMISKEELAWILLNFNQKRGYYQLRGEEEEDNAGKSVEFYALKVLTVEATDEKKGRDVWYNVHLENGWIYRRSSSVPLDWEGQVKEFIVTTDLNPDGTPKLDKYGEVKRSFRAPKEDDWMLIKKRTEADIANTHKTVGAYIYDTLLQKPQQKIIGKLVKTVERKLYRDELSLILQKQCAFHAELQDRALYARCVEALYPSNEVRRKNIANRDFVYLLMDDILFYQRPLKTKKSLIANCPYEENEYVDRETGEIKKTPLKCIAKSHPLFQEFRLWNFLSNIRIYQKEKEINGTLHLDVDVTAEFLKTEDDYVALFDWLNSRKEIEQKTFLKYPKFGLKKEISNYRWNYVEDKQYPCNETRHAILSSLEKANVCIDFLSNEKEVALWHILYSVSDKQEIEKALRTFAAKNGLDESFVEAFKKFPPFKSEYGAYSAKAIKKMLPLMRCGKYWDVSSIDDTTKERIKKIVTGEYDERISVKVRDKVMNLSDISCFRRLPLWLACYIVYNRHSEDKEAVKWESPADIDAYLASFKQHSLRNPIVEQVITETLRVVRDIWKQVGRIDEIHIELGREMKNPADKRKRMTAQILENENANLRIKALLAEFMNPEYEIENVRPYSPSQQEILRIYEDTVLHAEDQLPEEIDAILKKFNSSKVPTKSEFLRYKLWLEQKYRSPYTGELIPLGKLFTAAYEIEHVIPQSRYFDDSFSNKVICESAVNKLKDNQLGYEFIKNHHGQKVEVGFGKSVEIFSVDSYERFVKEQYAKSAVKMKKLLMDDIPEQFIERQLNDSRYISKVIKGLLSNIVREKNDSGEYEPEAVSKNIVVCTGSVTDRLKRDWGMNDVWNSIVYPRFERLNSLTDTQSFGHWENKSGKKVFQTELPLEYQKGFSKKRIDHRHHAMDAIVIACATRNHVNYLSNESASRNAKISRYDLQRLLCDKNRTDDNGNYKWVIKKPWDTFTQDAREVLSKIVVSLKQNLRIINKTTNVYRHLDATGNRVYEKQKTGDSWAIRKPMHKDTVFGAVNLRKVKVVRLSVALDTPAMIVDKRVKNKVFELLSYKYDKKRIEKYFKENAFLWKELDLAKVAVYYFTEATTEPLVAVRKPLDSTFNEKKIKESVTDTGIQKILLNHLCTKEGKPDLAFSAEGIEEMNRNLLQLNNGKSHQPIYKVRVYEPRGNKFSVGVLGNKGTKWVEAAKGTNLFFAIYITEDGKRTYETIPLNVVIEREKQGLVPVPDRNKKGDKLLFWLSPNDLVYLPTEEEREFGRINEPIDRGRIYKMVSCTGNEGHFIPANVANPIVPVIELGSNNKAQRAWTNEMIKDICIPIKVDRLGHIIEVKYRIDE

SEQ ID NO: 292 - protein, 1526 aa, Bacteroides faecis
MKKILGLDLGTNSIGWAVLNAADDNSLKYIEAAGSRIIPMDAAILGDFDRGNSISQTAERTRIRGMRHLRERYLLRRARLHRILNLLGFLPFHYAQDIDRYGNFSADMEPKIAWCKNLEGELEFIFIESFNEMLEDFRKNQPELVADNKKVPYDWVIYYLRKKALEKKISKEELAWILLNFNQKRGYYQLRGEDDDESMKTAKTRQYFDKQIIKNIIDTNQTYKGQRILIVELQNGDKGKIFKKEIPDWIGQEKNIIVTVDIDKDGNDKYEESGSLSCRFKIPTDAEWESEWKLIKMKTQKDLDESNKTVGTYIYDSILQNPTQKVRGKLVRTIERKYYKAELKQILEKQTEFHSELQDKDLYIECLNELYSNNDTHRNAITDRDFVYLFMNDILFYQRPLKSKKSLIDNCPYERNIYIDKETGEIKYSPIKCIAKSHPLFQEFRLWKFISSIRIYQRESVVEVVDKQLDLFSSQSTSVQKLVTDVDVTDKFLTCENDYVALFEWLNKKKIIDQKEFLKYRPFGLKGDIDNYRWNYVEDKSYPCNETHAMILTYFAKAGISEDILTKEMEEALWHILYSVEDRQEITKALRTFASKYHLSDSFVKVFSNIPPFKKEYGSYSAKAIKKLLSLMRMGKYWSEDAIDVNTRERIDKIVTGEYDEKIRDRVREKTIRLNDIRHFRALPDWLACYVVYDRHSETREITEWKSPEEIDEYIRNFKQHSLRNPIVEQVITETLRTVRDIWKQVGCIDEIHVELGREMKNPADKRKRITSQIIENENANLRVKALLTEFVNSEFEIENVRPYSLSQQDILRIYEDGVLNSVAEVPGDIAGILKKFNENDAKKRPTTSEILRYKLWLEQKYRSPYTGEMIPLSKLFTSAYEIEHVIPQSRYFDDSFSNKVICEAEVNKLKDNALGYEFIKKHHGEKVELGFGKIVEIFSVSVYEQFVKDNYSRNRGKMKKLLMDEIPEQFIERQLNDSRYISKVVKTLLSNVVREKAEQEAVSKNVIVCTGGVTDRLKKDWGINDVWNKIVLPRFLRLNELTNSTNFTAKNAAGNEIPAMPLELQKGFNKKRIDHRHHAMDAIVIACANRNIVNYLNNESASRKAKISRHDLQAILCDKVRTDDKGNYQWRVKKPWDTFTQDVYVALENIIVSFKQNLRVINKTSNYYWHYENGKKVLVKQVKGDSWAIRKPMHKDTVFGEVNLRKVKSVSLNEALKNPQFIVEKDLKRQLLSLLQQNFDIKKIKKYFEEHKDIWSDISLSKMNIYYFTKETKDRYFATRKPLDASFDKKKIESCITDTGIQQILLRHLELKENDPERAFSPDGIDEMNRNIIQLNKGKGHHPIAKVRVYEKADKFEVGQRGNKSSKFVEAAKGTNLFFAVYETEYPDEKTNSIVRKRNYATIPLNIAIERQKRGLSTAPEDEKGNVPSFVLSPNDLVYLPTSEDIVNGHITQPIDKSRIYKMVSSSGSQCFFIKHNIANIIVDKYEFSPLNKMERAISNEMIKEICIPVKVDRLGNIVKLGKSE

SEQ ID NO: 293 - protein, 1509 aa, Bacteroides fluxus
MKTILGLDLGTNSVGWAVINSVIKEQAERIWIEMAGSRIIPMDAAVLGDFDKGNSISQTSERTRLRGVRRLRERQLLRRERLHKVLNILGFLPNHYLEYIDFEKHPGKFLSDAEPKLPWVKDEQGKYTFLFQAAFDEMLADFAIHQPSLVSGDKKIPYDWTIYYLRKKALTEMISKEELAWILLNFNQKRGYYQLRGEEEEDNAGKSVEFYALKVLTVEATDEKKGRDVWYNVHLENGWIYRRSSSVPLDWEGQIKEFIVTTDLNPDSTPKLDKYGEVKRSFRAPKEDDWMLIKKRTEADIANTHKTVGAYIYDTLLQKPQQKIIGKLVKTVERKLYRDELSLILQKQCAFHAELQDRTLYARCVEALYPNNEVQRRNIANRDFVYLLMDDVLFYQRPLKTKKSLIANCPYEENEYVDRETGEIKKAPLKCIAKSHPLFQEFRLWNFLSNIRIYQKEKEINGTLHLDVDVTAEFLKTEDDYVALFDWLNSRKEIEQKTFLKYPKFGLKKEISNYRWNYVEDKQYPCNETRHAILSRLEKANVCIDFLSNEKEVALWHILYSVSDKQEIEKALRTFAAKNGLDESFVEAFKKFPPFKSEYGAYSAKAIKKLLPLMRCGKYWDVSSIDDTTKERIKKIVAGEYDERIAVKVRDKVMNLSDISCFKRLPLWLACYIVYNRHSEDKEAVKWESPADIDAYLASFKQHSLRNPIVEQVITETLRVVRDIWKQVGRIDEIHIELGREMKNPADKRKRMTAQILENENANLRIKALLAEFMNPEYEIENVRPYSPSQQEILRIYEDMVLHAEDQLPEEIDAILKKFNSSKVPTKSEFLRYKLWLEQKYRSPYTGELIPLGKLFTAAYEIEHVIPQSRYFDDSFSNKVICESAVNKLKDNQLGYEFIKNHHGQKVEVGFGKSVEIFSVDSYERFVKEQYAKSAVKMKKMLMDDIPEQFIERQLNDSRYISKVIKGLLSNIVREKNDSGEYEPEAVSKNIVVCTGSVTDRLKRDWGMNDVWNSIVYPRFERLNSLTDTQSFGHWENKSGKKVFQTELPLEYQKGFSKKRIDHRHHAMDAIVIACATRNHVNYLSNESASRNAKISRYDLQRLLCDKSRTDDNGNYKWVIKKPWDTFTQDAREVLSKIVVSLKQNLRIINKTTNVYRHLDATGNRVYEKQKTGDSWAIRKPMHKDTVFGAVNLRKVKVVRLSVALDAPTMIVDKRVKNKVFELLSYKYDKKRIEKYFKENAVLWKELDLARVAVYYFTEATTEPLVAVRKPLDSTFNEKKIKESVTDTGIQKILLNHLCTKEGKPDLAFSAEGIEEMNRNLLQLNNGKRHQPIYKVRVYEPRGNKFSVGVLGNKGTKWVEAAKGTNLFFAIYITEDGKRTYETIPLNMVIEREKQGLAPVPDKNEKGDKLLFWLSPNDLVYLPTEEELEFGRINEPIDRGRIYKMVSSSGNQCFFIPQSISNAIIPTKELGANNKAERSWDGAMIKNICIPVKVDRLGRIIEVKYRINE

SEQ ID NO: 294 - protein, 1436 aa, Bacteroides fragilis; identical to SEQ ID NO: 160

SEQ ID NO: 295 - protein, 1512 aa, Bacteroides nordii
MKNILGLDLGTNSIGWAVINSEEDGPIVKKRIELAGSRIIPMDAAVLGNFDSGVTKSQTAERTSFRSIRRLRERQLLRRERLHKVLQILGFLPEHYVNDIDFENHPGKIKRNTEPKLPWRKNSMGQFEFIFQDSFEAMLTDFATHQPVFVSEGKKVPYDWTLYYLRKKALTEGISKEELAWLILNFNQKRGYYQLRGEEEEEQSNKLVEFYALRVVKVEATDDKKGKDTWYNVHLENGWIYRRTSNIPLDWEGKVKEFIVTTDLNEDGTPKLDKYGEVKRSFRAPKEDDWTLIKKKTESDIANSHKTVGCYIYDALLQNPHQKIKGRLVRTVERKFYKEELRLILEKQLSFHPELQDRDLYRACIDALYVSNEAHKNNISGRDFVYLFIDDIIFYQRPLKTKKSLIDNCPYEENQYMDRETGEVKQAPIKCIAKSHPLFQEFRLWQFISNIRIYQRERVLDDGKLETDVDVTPDFLKTEDDYTTLFEWFNDRKEVDQKAFLKNPQFGLKKTFTEYRWNYVEDKSYPCNETRNAILNGLQKAGVSADFLSREVEEALWHILYSVEDKIEIESALRKFASKHDLDDRFADVFKKLPPFKKEYGAYSAKAIKKLLPLMRIGKYWELSNIDDKTKERIDKIITGEWDENIHDRVREKAIKLSDITDFKGLPLWLSCYVVYNRHSEARAIAKWESPEDIDSYLRLFRQHSLRNPIVEQVITETLRTVRDIWKRVGQIDEIHVELGREIKNPADKRAKMTAQIVENENTNLRIKALLAEFINSEYEIENVRPYSSNQQEKLKIYEDTVLNGVKEIPEDINTILKKFRESDLKKRPTKSDFLHYKLWLEQKYCSPYTGRIIPLGKLFTSAYEIEHIIPQAHYFDDSFSNKVICEAEVNGLKDKKLGYEFIKHNPGKMVEIGFGKPPVRIFSVEEYERFVKENYSGIKNKMNKLLMDDIPETFIERQLNDSRYISKVVKSLLSNIVREKDSNGEYEPEAISKNVIVCTGSVTDRLKRDWGVNDVWNSIIYPRFERLNELTGSQQFGCWENKEGKRVFQTAVPLEMQKGFSKKRIDHRHHAMDAIVIACATRNHINYLSNESASKKAKISRTDLQRLLCTKCRTDDNGNYKWIVKKPWPAFTQDIRKALENITVSFKQNLRVINKTTNYYVHFDESGKKVLEKQINGDSWAIRKPMHKDTVFGKVNLQKVKEVRLSLALDTPKMIVDKKLKEKVLQLYSYKYDKKRIDKYFKENASLWKDLNLSKVAVYYFTNDSTEPLVAVRKPLDTSFNAKKIKESVTDTGIQKILLNHLSNNQDDPNLAFSPDGIDKMNKNLTALNDGKYHQPIYKVRVCEPQGNKFSVGTSGNKTSKYVEAAKGTNLFFAVYQTEDGKRSYETIPLNVVIEREKLGWTPVPENNNNGDKLLFWLSPNDLVYVPTADELNNGMRLDNMDKGRIYKMISCSGPQCFFIPQNVSNAIIPVIELGANNKAEKSWNNEMIKVVCVPIRVDRLGCITQINNQK

SEQ ID NO: 296 - protein, 779 aa, Bacteroides oleiciplenus
MKEGNQYDVACEYAGYRHSKSSLTREEIDNKVLKNRLEILPKNSLRNPVVEKILNQMVNVVNAVIDTYGKPDEIRVELARELKKGAKEREELAKSIAQNTREHEAIRQLLQTEFGMMHVTRNDIIRYKLYEELKDNGYKTLYSDQYIPREKVFSKEIDIEHIIPQARLFDDSLSNKTLEYRAVNIEKGNKTAYDFVKEKYGNDGLRRYLNHCEALFKDKKTKLKKLKMEDQDIPDGFIDRDLRNTQYIAKKALSMLSEISRRVVATTGSITDELRKDWQLVDIMKELNLPKYEALGFVETFKDKDGRIIKKIKDWSKRNDHRHHAMDALTVAFTKDVFIQYFNNKNAFWMSGSKEHANITAIKNKYFEKGKALAPIPLELFRTEAKHHLENILVSIKAKNKVVTNNINRTKKKNGENLKLQQTPRGQLHLESIYGSYRQCIIRDEKVNASFDASKIANVSKSAYRNALLKRLEAYDNDPKKAFTGKNSLDKNPVYLDENKMEKVPDRVKIVEFETVYTIRKPIDPKLSIDKVVDARIRTLLKKRLEEYGGDAQRAFSNIEENPIWLNKEKGISVKRVAIRGISNAQALHDKKDKDGNPILDKEGKGIPTDFVNTSNNHHVAIYRKPVVDKMGQVILDENGSPRYELGEDVISFFEAVARVNLRQPVVDKDYKRSEGWQFLFSMKQNEYFVFPNEKTGFNPKEIDLLNPENYALISPNLFRVQKIGLNDYTFRHHLETSIQNNSNELKFITWIRCGKNGINGVIKVRVNHIGQIVSMGEY

SEQ ID NO: 297 - protein, 653 aa, Bacteroides oleiciplenus
MKKILGLDLGSSSIGWALVNEGANDEEKSSIIKLGVRVNPLTVDEAQNFEKGKSITTNADRTLKRGMRRNLQRYKQRREALVEVLKKHEFITAGTLMSEQGNKTTFETYRLRAKAVEEEISLEEFARVLLMINKKRGYKSSRKAKGDEDGVLIDGMDVAKKLYDEDLNPGELCLQLLEAGKKTLPDFYRSDLQDEFDKIWNFQKQFNPESFCDTAKEEVRGKNRTQTWTILSKYFVWTEGDSVWNNEEARTEERIKEYKLVGIKRTTKGYEQKLENYRWRVQALSEQLNPEIIAIVLQEINGQISASSGYLGAISDRSKELFFNHQTVGQSLMSELDKNPNGSLRNKVFYRQDYLDEFNTIWEKQSLYHKELTVELKKEIRDIIIFYQRRLKSQKGLISTCEFEQREIIVEKDGKRKTKIIGCKVIPRSHPLFQEFKIWQTLNDVEVYVADRRTKRKQDRKSTTLFSDTEDILLVEGKRYLYQEEKELLAKELFVRENMKKAEVLKLLFEDPKELDLNFKQIDGNRTGFALFSAYSKMIEKYGYESVNFKNSADEIIEKLQIIFADLGWNTELFSIDLSKDDKELEKQPYFRLWHLLYSFEGDNTPTGNGKLIEALMRLCSVEKEYASVLANVSFQEDYGSLSAKAIKKYYLI

SEQ ID NO: 298 - protein, 1436 aa, Bacteroides sp.
MKRILGLDLGTNSIGWALVDEAENKDERSSIVKLGVRVNPLTVDELTNFEKGKSITTNADRTLKRGMRRNLQRYKLRRETLMEVLKEHKLITEDTILSENGNRTTFETYRLRAKAATEKISLEEFARVLLMINKKRGYKSCRKAKGAEEGTLIDGMDIARELYNNNLTPGELCLQLLDAGKKYLPDFYRSDLQNELDRIWEKQKEYYPEILTEVLKEELRGKKRDAVWAICAKSFVWEEYYTEWNKEKGKTEQQEREHKLEGIYSKRKRDEAKRENLQWRVNGLKEKLSLEQLVIVLQEMNIQINNSSGYLGAISDRSKELYFNKQTVGQYQMEMLDKNPNASLRNMVFYRQDYLDEFNTLWEKQAEYHKELTGELKKEIRDIVIFYQRRLKSQKGLVGFCEFESRQIEVEIDGKKKIKTVGNRVIPRSSPLFQEFKIWQILNNIEVTVVGKKGKRRKQKDNSPTLFDGLDDTEQLELNGSRYLYQEEKELLAQELFVRDKMTKSDVLKLLFDNPQELDLNFKTIDGNKTGYTLFQAYSKMIEMSGHEPVDFKKTVEKVVEHVKAVFDLLNWNTDILGFNSNEELDNQSYYKLWHLLYSFEGDNTPTGNARLVQKITELYGFEKEYAIILANVTFQDDYGSLSAKAIHKILPHLKEGNRYDVACAYAGYKHSESSLTKEEIANKALKDRLTLLPKNNLRNPVVEKILNQMVNVINAIIDTYGKPDEIRVELARELKKNAKEREELTKFIAETTRKHEEFKILLQSEFGLTNVSRTDILRYKLYKELESCGYKTLYSNTYIPREKLFSKEFDIEHIIPQARLFDDSFSNKTLEARSINLEKGNKTAYDFVKEKFGESGADNSLDHYLNNIEDLFKSGKISKTKYNKLKMAEQDIPDGFINRDLRNTQYIAKKALSMLNEISRRVVATSGTITDKLRQDWQLVDVMKELNWEKYKALGLVEYFEDKDGRQIGRIKDWTKRNDHRHHAMDALTVAFTKDIFIQYFNNKNASLNSNTNEYAIKNKYFQNGRAIAPIPLREFRVEAKKHLENTLISIKAKNKVVTGNINKTKKRGGVNKYLQQTPRGQLHLETIYGSGKQYLTKEEKVNASFDMKKIATVSKSAYRDVLLKRLHENDNDPKKAFTGKNSLDKQPIWLDKEQTRKVPEKVKTVTLETIYTVRKEISPDLKVDKVIDAGVRKILTGRLNEYGNDAKKAFSNLDENPIWLNKEKGISIKRVTISGISNAQSLHVKKDKDGKPILDEDSRNIPVDFVNTGNNHHVAVYRRPVIDKRGQLVIDEAGNPKYELEEVVVSFFEAVTRANLGQPIIDKDYKTSEGWQFLFSMKQNEYFVFPNEKTGFNPKEIDLLDAENYGVISPNLFRVQKFAHKNYVFRHHLETTIKDTSSILKGITWIDFRSSKGLDAIVKVRVNHIGQIVSVGEY

SEQ ID NO: 299 - protein, 1510 aa, Bacteroides sp.
MKRILGLDLGTNSIGWALVDSEEQRILGMGSRIIPMDQGVLDTFSGGNPVETQTAARTAYRGTRRLRERALLRRERLIRVLNMMKFLPEHYASQIDFEKRLGQFFDEKEPKLAWKQNDEGRFEFIFQQSFNEMIEEFKNKGVVREDKKIPYDWTIYYLRKKALSQEIEKEELAWILLNFNQKRGYYQLRGEEEEENPNKLVEYYSLKIVDVIADEKPNSKGDIWYSLHLENGWIYRRSSKIPLFGWKDKTRDFIVTTDLNDDGTVKKDKEGIEKRSFRAPSENDWVLLKKKTESDIEKSHKTVGAYVYETLLQNPMQKVRGKLVRTIERKFYKDELKQILEKQREFHPELRDEDLYNDCVRELYRSNETYQFILSKRDFVHLFLDDILFYQRPLRSQKSAIGDCILEFKTYKDKDGNNIKEYLKVISKSNPLYQEFRIWQWLYNLKIYRKEDDEDVTLQFIANIEDKEQLFDFLSNRKSIEQKPLLEYLIKAKGLKKQVKTEAYRWNYVEDKIYPCSETKTMISTRLAKVENIPDNFFTKEIEQKLWHIIYSVTDKNEFEKALRTFAKKYDLDIASFVDNFKKIPPFKNEYGSFSEKAIKKLLPLMRLGKYWKWNDIDNNTQNRISKIITGEYDEEIKDIVREKSIALTNENDFQGLQLWLAQYLVYGRHSEADIAGKWHSVADLEKYLNEFKQHSLRNPIVEQIITETLRVVRDIWRKYGQGAENFFSEIHVELGRDMKNTADERKKIVNVVTENENTNLRIKALLMELKNNSDGKLEVENVRPYSPTQQDILKIYEEYAISTGLDNEKDEKVKEDIKKISRVAQPTTTELQRYKLWLEQKYCSPYTGKVIPLGKLFTEEYQIEHIIPKSRYYDDSFSNKVICEAAVNKLKDKCLGLEFIKNYHGQIVETGFGQKVTIFDEEAYQNFVKQHYAYNRSKRTKLLLEEIPEKMIERQMNDTRYISKFVLPLLSNLVRAEENDNGVNSKNVLPVNGKITTMLKQDWGLNDVWNDLILPRFVRMNELAKTIAFTSWNEQHQKYLPTVPLELSKGFQKKRIDHRHHAMDALVIACATRDHVNLLNNKHANTDTIRYDLQRKLRLFERVTYIDPQTKNNVTKDIPKEFKKPWDNFTVDARNELEKIIVSFKQNLRIINKATNIYTKYENGKKIKVGQKGLNWAIRKPLHKETVFAKVSLRKRKTVRLSEALKDWKKIVDKKLKQEIKRLTCQYGKFDVDTILRYFKDRKYQFGEVDVSKVKMYYFDEENAAVRKNVDTSFTEKFIQGSVTDTGIQKILLNHLEAKGNKVEIAFSPEGIEEMNKNIIQLNEGKLHLPIFKVRVYETIGNKFSVGVKGNKKDKYVEAAKGTNLFFAIYVDENGIRSYETIPLNIVIERLKQGLSVVPEKNRKEHSLLFYLSPNDLVYVPIEDERENIHAVNLDQLNNEQRKRIYKMVSCTGSECHFVPYYVASPIVNKVEYSSLNKIGRSLTGEMIKDVCIKLKVDRLGNVKGISGL

SEQ ID NO: 300 - protein, 1436 aa, Bacteroides sp.
MKRILGLDLGTNSIGWALVNEAENKDERSSIVKLGVRVNPLTVDELTNFEKGKSITTNADRTLKRGMRRNLQRYKLRRETLTEVLKEHKLITEDTILSENGNRTTFETYRLRAKAVTEEISLEEFARVLLMINKKRGYKSSRKAKGVEEGTLIDGMDIARELYNNNLTPGELCLQLLDAGKKFLPDFYRSDLQNELDRIWEKQKEYYPEILTDVLKEELRGKKRDAVWAICAKYFVWKETYTEWNKEKGKTEQQEREHKLEGIYSKRKRDEAKRENLQWRVNGLKEKLSLEQLVIVFQEMNTQINNSSGYLGAISDRSKELYFNKQTVGQYQMEMLDKNPNASLRNMVFYRQDYLDEFNMLWEKQAVYHKELTEELKKEIRDIIIFYQRRLKSQKGLIGFCEFESRQIEVDIDGKKKIKTVGNRVISRSSPLFQEFKIWQILNNIEVTVVGKKRKRRKLKENYSAIFEELNDAEQLELNGSRRLCQEEKELLAQELFVRDKMTKSEVLKLLFDNPQELDLNFKTIDGNKTGYALFQAYSKMIEMSGHEPVDFKKPVEKVVEYIKAVFDLLNWNTDILGFNSNEELDNQSYYKLWHLLYSFEGDNTPTGNGRLIQKMTELYGFEKEYATILANVSFQDDYGSLSAKAIHKILPHLKEGNRYDVACVYAGYRHSESSLTREEIANKVLKDRLMLLPKNSLHNPVVEKILNQMVNVINVIIDIYGKPDEIRVELARELKKNAKEREELTKSIAQTTKANEEYKTLLQTEFGLTNVSRTDILRYKLYKELESCGYKTLYSNTYISREKLFSKEFDIEHIIPQARLFDDSFSNKTLEARSVNIEKGNKTAYDFVKEKFGESGADNSLEHYLNNIEDLFKSGKISKTKYNKLKMAEQDIPDGFIERDLRNTQYIAKKALSMLNEISHRVVATSGSVTDKLREDWQLIDVMKELNWEKYKALGLVEYFEDRDGRQIGRIKDWTKRNDHRHHAMDALTVAFTKDVFIQYFNNKNASLDPNANEHAIKNKYFQNGRAIAPMPLREFRAEAKKHLENTLISIKAKNKVITGNINKTRKKGGVNKNMQQTPRGQLHLETIYGSGKQYLTKEEKVNASFDMRKIETVSKSAYRDALLKRLYENDNDPKKAFAGKNSLDKQPIWLDKEQMRKVPEKVKIVTLEAIYTIRKEISPDLKVDKVIDVGVRKILIDRLNEYGNDAKKAFSNLDKNPIWLNKEKGISIKRVTISGISNAQSLHVKKDKDGKPILDENGRNIPVDFVNTGNNHHVAVYYRPVIDKRGQLVVDEAGNPKYELEEVVVSFFEAVTRANLGLPIIDKDYKTTEGWQFLFSMKQNEYFVFPNEKIGFNPKEIDLLDVENYGLISPNLFRVQKFSLKNYVFRHHLETTIKDTSSILRGITWIDFRSSKGLDTIVKVRVNHIGQIVSVGEY

SEQ ID NO: 301 - protein, 1424 aa, Bacteroides sp.
MKRILGLDLGTNSIGWALVNEAETDEEVSSIIRLGVRVNPLTVDETQNFEKGKSITTNAERTLKRSMRRNLQRYKLRRDALVEFLKELGFITDETILSEQGNRTTFETCRLRAKAAEEEISLEELSRVLLMINKKRGYKSSRKVKKEEDGVLIDGMEIAKKLYEEDLTPGQLCSQLLESGKKVLPDFYHSDLQEELDRIWSVQKQFHPDVFCDAAKEEIKGKNRSQTWAILANYFVWKEEVVGWNDREAKNETIEKECKLVGLKRTTKGYELKKENYRWRAQALTEQLGLEEIAVVLQEINGQINASSGYLGAISDRSKVLYFNHQTVGQYQMAELDKNPHASLRNMVFYRQDYLDEFDRIWEKQAEFHKELTAELKKEIRDMIIFYQRRLKSQKGLISFCEFERLEIVVEKDGKKQTKVIGCKVIPRSHPLFQEFKVWQTLNDIKVLGREKKRNALSASESRALYPEEKEILARELAIKENMKKADVLKLLFENPQELDLNFKQIDGNRTGFSLFSAYSKMIEKYGYEPLDFKKPADEIIGQLRTIFTDLGWNTNLFTIDLTKEGKELEMQPYFRLWHLLYSFEGDNTSTGNGKLIEKIMQLCGVEKEYAVELASLSFQDDYGSLSAKAIKRILPYLKEGNLYDVACEYAGYRHSKSSLTKEEIENKVLKGKLEVLPKNSLRNPVVEKILSQMVNVINTIIDTYGKPDEIRVELARELKKSAKEREELTKAIAKSTREHEEIRKLLQDEFGMMNVSRNDIIRYKLYEELKDNGYKTLYSNQYIPKEKIFSKEIDIEHIIPQSRLFDDSLSNKTLEYKAINIEKGNKTAYDFVKEKYGEEGLQQYINRCESLFNDKKAKLRKLKMEQKDIPDGFIDRDLRNTQYIAKKALAMLNEICRRVVATTGSITDQLREDWQLVDVMKELNLPKYEALGFVETYEDKDGRKIKRIKDWTKRNDHRHHAMDALTVAFTKDAFIQYFNNKNAAQDSGNRNHTNIIGIKTRYFDKGRALPPIPLEQFRIEAKQHLEKLLVSIKAKNKVVTVNVNRTKKRKGENTKIQQTPRGQLHLETVYGSHKQYVTKIEKVNASFDAAKIATVSKRAYRNALLKRLETFGNDPKKAFTGKNALEKNPLYADKYQTIRVPEKVQTVEFETIYTIRKPVDPALNVDKVVDVKVRAILERRLKEYGGDPKKAFVNFWENPIWLNKEKGISIKRVSIRGINNAQSIHVKKDKNGNPIWDENGKQIPVDFVNTGNNHHVAIYRKPVLDKKGQVTFDEDGNLMYELDEVVVPFFEAVTRANLGLPIIDKDYRKSEGWQFLFSMKQNEYFVFPNEKTGFNPKEVDLLNPDNYAMISPNLFRVQTMSKVMYGNNVVRDYKFRHHLETTVKDMKELKDIAYKQYKTLSFGNSVVKIRINHIGQIVSVGEY

SEQ ID NO: 302 - protein, 1055 aa, Bacteroides sp.
MRIYRKDLAQDVDVTNELLKTEEDYVALFDWLNGKKEIDQKAFLKYPLFGLKKEVENYRWNYVQDKPYPCNETRSSMLARLEKCDISIEFLTKENEEALWHILYSVEDKNEIVKALQKFADKHDLNASFVDVFQKFPPFKKEYGSYSAKAIKKLLPLMRMGKYWSENSIDKGTRERMDKIITGEYDEKIENRVREKAIHLADVSDFKGLPLWLVCYIVYGRHSEAKEITQWKSPADIDLYLRSFKQHSLRNPIVEQIIIETLRVVRDIWKQVGNIDEIHVELGREMKNPADKRKKMTQQMSENENTNLRIKYLLTEFLNPEYEVENVRPYSPSQQDILRIYEEGVLNSVSDLPEEISDILKKFTETDLKKRPSRSEVLRYKLWLEQKYRSPYTGEVIPLGKLFTPAYEIEHVIPQSCYFDDSFSNKVICEAEVNKLKSNLLGHEFIVKHHGEIVELPFGKKVRIFTVDEYEQFVKDNYSRTRSKMKKLLMDDIPEEFVARQLNDSRYISKVVKSLLSNIVREKGEEEAISKNVIPCTGGVTDRLKKDWGINEVWNKIILPRFQRLNELTGTNKFTTKNVGIQEIPTMPLELQKGFNKKRIDHRHHAMDAIIIACANRNIINYLNNESATAKAELSRYDLQKMLCDKAKTDNNGNYKWVIRKPWASFTQDTYLALENIIVSFKQNLRVINKATNHFLHYNEEGKKIFVKQGKGDNWAIRKSMHKDTVFGEVNLRRIKTVALNEAMKNPQSIVVKDFKRKLLELWNLGFDAKRIKKYFEDNRETWSDINLSKIEVYYFSKDTKDRFFATRKPLDTSFDRKKIENNITDTGIQKILLRHLELKDNNPDIAFSPDGIDEMNRNIIQLNNGKYHQPIIKVRWYEQADKFAVGQTGNKSSKFVEAAKGTNLFFAVYESNILDKKTNTIIKKRNYATIPLNVAIERQKQGLPVAPEDENGNDPIFVLSPNDLVYLPTAADLANGIIAQPLDRGRIYKMVSCTGNEGYFIPARIANPILQTIELGSNNKAQKAWTDEMIKEICMPIKVDRLGNVLESSSSYKK

SEQ ID NO: 303 - protein, 1055 aa, Bacteroides sp.
MRIYRKDLAQDVDVTNELLKTEEDYVALFDWLNGKKEIDQKAFLKYPVFGLKKEIENYRWNYVQDKPYPCNETRSLMLARLEKCDISIEFLTKENEEALWHILYSVEDKNEIVKALQKFADKHDLNASFVDVFQKFPPFKKEYGSYSAKAIKKLLPLMRMGKYWSENSIDKGTRERIDKIITGEYDEKIENRVREKAIHLADVSDFKGLPLWLVCYIVYGRHSEAKEIIQWKSPADIDSYLRSFKQHSLRNPIVEQIIIETLRVVRDIWKQVGNIDEIHVELGREMKNPADKRKKMTQQMSENENTNLRIKYLLTEFLNPEYEVENVRPYSPSQQDILRIYEEGVLNSVSDLPEEISDILKKFTETDLKKRPSRSEVLRYKLWLEQKYRSPYTGEVIPLGKLFTPAYEIEHVIPQSCYFDDSFSNKVICEAEVNKLKSNLLGHEFIVKHHGEIVELPFGKKVRIFTVDEYEQFVKDNYSRTRSKMKKLLMDDIPEEFVTRQLNDSRYISKVVKSLLSNIVREKGEEEAISKNVIPCTGGVTDRLKKDWGINEVWNKIILPRFQRLNELTGTNKFTTKNVGIQEIPTMPLELQKGFNKKRIDHRHHAMDAIIIACANRNIINYLNNESATAKAELSRYDLQKMLCDKAKTDNNGNYKWVIRKPWASFTQDTYLALENIIVSFKQNLRVINKATNRFLHYNEEGKKIFVKQGKGDNWAIRKSMHKDTVFGEVNLRRIKTVALNEAMKNPQSIVVKDFKRKLLELWNLGFDAKRIKKYFEDNRETWSDINLSKIEVYYFSKDTKDRFFATRKPLDTSFDRKKIENNITDTGIQKILLRHLELKDNNPDIAFSPDGIDEMNRNIIQLNNGKYHQPIIKIRWYEQADKFAVGQTGNKSSKFVEAAKGTNLFFAVYESNILDKKTNTIIKKRNYATIPLNVAIERQKQGLPVAPEDENGNDPIFVLSPNDLVYLPTDDELANGIIAQPLDRGRIYKMVSSSGEQCFFIKHIVANVLVDKFEFSPLNKMERALTGEMIKMICIPIKVDRLGNVLESSSSYKK

SEQ ID NO: 304 - protein, 286 aa, Bacteroides uniformis
MLSYKYDKKKIEKYFKENAFLWKELDIAKVAVYYFTENTTEPLVAVRKSLDSTFNEKKIASVTDTGIQKILLNHLKSKEGKAELAFSAEGIEEMNRNLLQLNDGKGHQPIYKVRVYEPRGNKFKVGVLGNKGAKWVEAAKGTNLFFAIYITEDGNRTYETIPLNWVIEREKQGLVPVPDRNEKGDKLLFWLSPNDLVYLPTEEERDFGRINEPIDRGRIYKMVSSSGNQCFFIPQSISNAIISTKELGSNNKAEKSWDGEMIKNICIPVKVDRLGRIIEVKYRVNE

SEQ ID NO: 305 - protein, 1508 aa, Bacteroides uniformis
MRTILGLDLGTNSIGWAVINSVIKEQTERIWIEMAGSRIIPMDAAILGDFDKGNSISQTAERTRFRGVRRLRERQLLRRERLHKVLKILGFLPEHYLKGIDFEKHTGKFLSGSEPKLPWVKDRWGKYSFLFQTAFNEMLADFAKHQPSLVFDGKKIPYDWTVYYLRKKALTEMISKEELAWILLNFNQKRGYYQLRGEEEEDNAGKSVEFYALKVLSVEATDEKKGRDIWYNVHLENGWVYRRSSNVPLDWEGRVKEFIVTTDLNPDGTPKLDKYGEVKRSFRAPKEDDWMLIKKRTEADITGTHKTIGSYIYDALLQEPQQKIIGKLVKTVERKFYKEELNFILQKQCAFHAELQDRDLYMRCIEALYPGNEVQRRNIANRDFIYLLIDDVLFYQRPLKTKKSLIANCPYEENEYVNRKTGEIKTAPLKCIAKSHPLFQEFRLWYFLSNIRVYQKEREVNGTLHLDVDVTTEFLKTEDDYVALFDWLNSRKEIDQKAFLRYPAFGLKKEINNYRWNYVEDKFYPCNETRHAILSRLEKAGIGIDFLSDEKETALWHILYSVSDKQEIEKALATFAVKNGLNESFVEVFKKFPPFKSEYGAYSAKAIKKLLPLMRCGKYWDMSLIDGTTKERIERIIAGECDESIGAKVREKAMNLSDISCFKRLPLWLACYVVYNRHSEDKEITKWETPADIDAYLAAFKQHSLRNPIVEQVITETLRVVRDIWKQVGKIDEIRIELGREMKNPADKRKRMTTQILENENANLRIKALLAEFVNPEYGVENVRPYSPSQQEILRIYEDAVLKGEEQIPEDIDVILKKFNTSKLPTKSEFLRYKLWLEQKYRSPYTGELIPLAKLFTAAYEIEHVIPQSRYFDDSFSNKVICESAVNKLKDNQLGYEFIKNHHGQKVEVGFGKTVEIFSVDSYERFVKEQYAKSGIKMKKLLMDDIPEQFIERQLNDSRYISKVVKGLLSNIVREKNDSGEYEPEAVSKNILVCTGSVTDRLKKDWGMNDVWNSIVSPRFERLNALTETQCFGHWENKDGKKVFQTAVPLEYQKGFSKKRIDHRHHAMDAIVIACATRNHVNYLNNESASRNAKISRYDLQRLLCDKSRGDGNGNYRWIIKKPWTTFTQDAREALSGIIVSLKQNLRIINKTTNIYQHFDANGTRVYEKQKIGDSWAIRKPMHKDTVFGAVNLRKVKVVRLSVALDTPSMIVNKRVKNKVLELLSYKYDKKKIEKYFKENAFLWKELDIAKVAVYYFTENTTEPLVAVRKSLDSTFNEKKIASVTDTGIQKILLNHLKSKEGKAELAFSAEGIEEMNRNLLQLNDGKGHQPIYKVRVYEPRGNKFKVGVLGNKGAKWVEAAKGTNLFFAIYITEDGNRTYETIPLNWVIEREKQGLVPVPDRNEKGDKLLFWLSPNDLVYLPTEEERDFGRINEPIDRGRIYKMVSSSGNQCFFIPQSISNAIISTKELGSNNKAEKSWDGEMIKNICIPVKVDRLGRIIEVKYRVNE

SEQ ID NO: 306 - protein, 1210 aa, Bacteroides uniformis
MRTILGLDLGTNSIGWAVINSVIKEQTERIWIEMAGSRIIPMDAAILGDFDKGNSISQTAERTRFRGVRRLRERQLLRRERLHKVLKILGFLPEHYLKGIDFEKHTGKFLSGSEPKLPWVKDRWGKYSFLFQTAFNEMLADFAKHQPSLVFDGKKIPYDWTVYYLRKKALTEMISKEELAWILLNFNQKRGYYQLRGEEEEDNAGKSVEFYALKVLSVEATDEKKGRDIWYNVHLENGWVYRRSSNVPLDWEGRVKEFIVTTDLNPDGTPKLDKYGEVKRSFRAPKEDDWMLIKKRTEADITGTHKTIGSYIYDALLQEPQQKIIGKLVKTVERKFYKEELNFILQKQCAFHAELQDRDLYMRCIEALYPGNEVQRRNIANRDFIYLLIDDVLFYQRPLKTKKSLIANCPYEENEYVNRKTGEIKTAPLKCIAKSHPLFQEFRLWYFLSNIRVYQKEREVNGTLHLDVDVTTEFLKTEDDYVALFDWLNSRKEIDQKAFLRYPAFGLKKEINNYRWNYVEDKFYPCNETRHAILSRLEKAGIGIDFLSDEKETALWHILYSVSDKQEIEKALATFAVKNGLNESFVEVFKKFPPFKSEYGAYSAKAIKKLLPLMRCGKYWDMSLIDGTTKERIERIIAGECDESIGAKVREKAMNLSDISCFKRLPLWLACYVVYNRHSEDKEITKWETPADIDAYLAAFKQHSLRNPIVEQVITETLRVVRDIWKQVGKIDEIRIELGREMKNPADKRKRMTTQILENENANLRIKALLAEFVNPEYGVENVRPYSPSQQEILRIYEDAVLKGEEQIPEDIDVILKKFNTSKLPTKSEFLRYKLWLEQKYRSPYTGELIPLAKLFTAAYEIEHVIPQSRYFDDSFSNKVICESAVNKLKDNQLGYEFIKNHHGQKVEVGFGKTVEIFSVDSYERFVKEQYAKSGIKMKKLLMDDIPEQFIERQLNDSRYISKVVKGLLSNIVREKNDSGEYEPEAVSKNILVCTGSVTDRLKKDWGMNDVWNSIVSPRFERLNALTETQCFGHWENKDGKKVFQTAVPLEYQKGFSKKRIDHRHHAMDAIVIACATRNHVNYLNNESASRNAKISRYDLQRLLCDKSRGDGNGNYRWIIKKPWTTFTQDAREALSGIIVSLKQNLRIINKTTNIYQHFDANGTRVYEKQKIGDSWAIRKPMHKDTVFGAVNLRKALIPQHYNLTLFISS

SEQ ID NO: 307 - protein, 1504 aa, Bacteroides vulgatus
MKNIVGLDLGTNSIGWAVVNGSVNDDGSEQLVKIQASGSRIIPMDAAMIGDFNKGNSISQTAERTRLRGVRRLSERYLLRRERLHRILDILGFLPFHFAQDLDRHGKIVKGKEPKLAWRKNEAGQFEFIFQDSFKEMLEDFKLNHPNLITDDKKVPYDWTIYYLRKKGLTSKISKEELAWILLNFNQKRGYYQLRGEEEEENKNKLVEFYALKVVAVEDSGEKKGKDIWYNVHLENGWVYRRTSNMPLDWVGKTKEFIVTTDLEKDGTPKKDKEGNVKRSFRAPKEDDWSLLKKKTEADIDQTHKTVGVYIYDTLLGNPSQKIRGRLVRTIERKYYKEELKQILEKQKEFHLELQDRALYAACIEELYPINEAHRNNVGNRDFTYLFLEDILFYQRPLKSKKSLIDNCPYEENQGLDKETGEIKSFPVKCIAKSHPLFQEFRLWQFIVNLRIYRKDLAQDVDVTNELLKTEEDYVALFDWLNGKKEIDQKAFLKYPVFGLKKEIENYRWNYVQDKPYPCNETRSLMLARLEKCDISIEFLTKENEEALWHILYSVEDKNEIVKALQKFADKHDLNASFVDVFQKFPPFKKEYGSYSAKAIKKLLPLMRMGKYWSENSIDKGTRERIDKIITGEYDEKIENRVREKAIHLADVSDFKGLPLWLVCYIVYGRHSEAKEITQWKSPADIDSYLRSFKQHSLRNPIVEQIIIETLRVVRDIWKQVGNIDEIHVELGREMKNPADKRKKMTQQMSENENTNLRIKYLLTEFLNPEYEVENVRPYSPSQQDILRIYEEGVLNSVSDLPEEISDILKKFTETDLKKRPSRSEILRYKLWLEQKYRSPYTGEVIPLGKLFTPAYEIEHVIPQSCYFDDSFSNKVICEAEVNKLKSNLLGHEFIVKHHGEIVELPFGKKVRIFTVDEYEQFVKDNYSRTRSKMKKLLMDDIPEEFVTRQLNDSRYISKVVKSLLSNIVREKGEEEAISKNVIPCTGGVTDRLKKDWGINEVWNKIILPRFQRLNELTGTNKFTTKNVGIQEIPTMPLELQKGFNKKRIDHRHHAMDAIIIACANRNIINYLNNESATAKAELSRYDLQKMLCDKAKTDNNGNYKWVIRKPWASFTQDTYLALENIIVSFKQNLRVINKATNRFLHYNEEGKKIFVKQGKGDNWAIRKSMHKDTVFGEVNLRRIKTVALNEAMKNPQSIVVKDFKRKLLELWNLGFDAKRIKKYFEDNRETWSDINLSKIEVYYFSKDTKDRFFATRKPLDTSFDRKKIENNITDTGIQKILLRHLELKDNNPDIAFSPDGIDEMNRNIIQLNNGKYHQPIIKIRWYEQADKFAVGQTGNKFSKFVEAAKGTNLFFAVYESNILDKKTNTIIKKRNYATIPLNVAIERQKQGLPVAPEDENGNDPIFVLSPNDLVYLPTDDELANGIIAQPLDRGRIYKMVSCTGNEGHFIPARIANPILQTIELGSNNKAQKAWTDEMIKEICMPIKVDRLGNVLESSSSYKK

SEQ ID NO: 308 - protein, 1153 aa, Barnesiella intestinihominis
MKNILGLDLGLSSIGWSVIRENSEEQELVAMGSRVVSLTAAELSSFTQGNGVSINSQRTQKRTQRKGYDRYQLRRTLLRNKLDTLGMLPDDSLSYLPKLQLWGLRAKAVTQRIELNELGRVLLHLNQKRGYKSIKSDFSGDKKITDYVKTVKTRYDELKEMRLTIGELFFRRLTENAFFRCKEQVYPRQAYVEEFDCIMNCQRKFYPDILTDETIRCIRDEIIYYQRPLKSCKYLVSRCEFEKRFYLNAAGKKTEAGPKVSPRTSPLFQVCRLWESINNIVVKDRRNEIVFISAEQRAALFDFLNTHEKLKGSDLLKLLGLSKTYGYRLGEQFKTGIQGNKTRVEIERALGNYPDKKRLLQFNLQEESSSMVNTETGEIIPMISLSFEQEPLYRLWHVLYSIDDREQLQSVLRQKFGIDDDEVLERLSAIDLVKAGFGNKSSKAIRRILPFLQLGMNYAEACEAAGYNHSNNYTKAENEARALLDRLPAIKKNELRQPVVEKILNQMVNVVNALMEKYGRFDEIRVELARELKQSKEERSNTYKSINKNQRENEQIAKRIVEYGVPTRSRIQKYKMWEESKHCCIYCGQPVDVGDFLRGFDVEVEHIIPKSLYFDDSFANKVCSCRSCNKEKNNRTAYDYMKSKGEKALSDYVERVNTMYTNNQISKTKWQNLLTPVDKISIDFIDRQLRESQYIARKAKEILTSICYNVTATSGSVTSFLRHVWGWDTVLHDLNFDRYKKVGLTEVIEVNHRGSVIRREQIKDWSKRFDHRHHAIDALTIACTKQAYIQRLNNLRAEEGPDFNKMSLERYIQSQPHFSVAQVREAVDRILVSFRAGKRAVTPGKRYIRKNRKRISVQSVLIPRGALSEESVYGVIHVWEKDEQGHVIQKQRAVMKYPITSINREMLDKEKVVDKRIHRILSGRLAQYNDNPKEAFAKPVYIDKECRIPIRTVRCFAKPAINTLVPLKKDDKGNPVAWVNPGNNHHVAIYRDEDGKYKERTVTFWEAVDRCRVGIPAIVTQPDTIWDNILQRNDISENVLESLPDVKWQFVLSLQQNEMFILGMNEEDYRYAMDQQDYALLNKYLYRVQKLSKSDYSFRYHTETSVEDKYDGKPNLKLSMQMGKLKRVSIKSLLGLNPHKVHISVLGEIKEIS

SEQ ID NO: 309 - protein, 1352 aa, Belliella baltica
MKKILGLDLGTTSIGWAFIKEPEKDVVGSEIVDMGVRIVPLSSDEENDFAKGNTISINADRTLKRGARRNLQRFKQRRNALLEIFKEKKLISTNFKYAEDGPSSTFSTLNLRAKAAKEKIELQDLVKVLLQINKKRGYKSSRKAKSEEDDGSAIDSMGIAKELYENDLTPGQWVYEALQKGRKNVPDFYRSDLQEEFKKIVNYQSEFFPDIFNASFVEDWMGKASTPTKQYFNKKGVQLAENKGKREERRLQEYKWRAEAVNFKIDLSEIALILSQINSQISNSSGYLGAISDRSKELYFKNLTVGQYLYQQIKKNPHTRLKGQVFYRQDYLDEFERIWSVQSSFYPQLNDALKREVRDITIFFQRRLKSQKHLISNCEFEDHHKVVPKSHPVFQEFRIWQNLNNLLLIKKDNLNEKFDLELESKIALANELAFKRELNVKDALKILGLKPNEWEFNFTKIEGNRTNQAFFDAFAKIIELEDGEPIDLGDLKADDILDQFSEAFLRIGIDTELLQVNSDIEGAEYEKQSYIQFWHLLYSSEDDQKLKLNLIRKFGFKPEHAKILASISLQDDHASLSSRAIKKILPHLQSGLIYDKACTYAGYNHSSSFTKDENEKRELRAELELLKKNSLRNPVVEKILNQMINVVNAILKDPELGRPDEIRVEMARELKANAEQRKNMTSNIASATRDHDKYREILKSEFGLKRVTKNDLLRYKLWLETDGISLYTGKPIEASKLFSKEYDIEHIIPKARLFDDSFSNKTICERQLNIDKANVTAFSFLQNKLSADEFEQYQSRVKSLYGKLSKAKIQKLLMANDKIPEDFIARQLQETRYISKKAKEILFEISRRVSVTTGTITDKLREDWGLVEIMKELNWEKYDKLGLTYTIEGKHGERLNKIKDWSKRNDHRHHAMDALTVALTKPAYIQYLNNLNAKGLNNKKGTEVFAIEQKYLKRENGKLCFIPPIENIRSEAKKHLSRILVSYKAKNKVVTINKNKTKSKAGLNEQIALTPRGQLHKETVYGKSFHYSTKFEKIGASFNVQKINTVAKKEEREALLKRLAENGNDPKKAFTGKNTLNKMPIYLDLGKNIKLSEKVKTVVLEQNYTIRKNIDPDLKVDKVIDVGIKRILESRLEEFGGNAKLAFSNLEENPIWLNKEKGISIKRVKISGVSNVESLHVKKDHFGEPILDQEGNEIPVDFVSTGNNHHVAIYEDENGNLQEEVVSFFEAVVRQNQGLPIIKKNHTLGWKFLFTLKQNEYFVFPSDDFVPADVDLMDEQNYHLISPNLFRVQKIARKNYVFNNHLETKAVDNDLLKSKKELSKITYHFYQTPEHLRGIIKIRINHLGKIIQIGEY

SEQ ID NO: 310 - protein, 1415 aa, Bergeyella zoohelcum
MKHILGLDLGTNSIGWALIERNIEEKYGKIIGMGSRIVPMGAELSKFEQGQAQTKNADRRTNRGARRLNKRYKQRRNKLIYILQKLDMLPSQIKLKEDFSDPNKIDKITILPISKKQEQLTAFDLVSLRVKALTEKVGLEDLGKIIYKYNQLRGYAGGSLEPEKEDIFDEEQSKDKKNKSFIAFSKIVFLGEPQEEIFKNKKLNRRAIIVETEEGNFEGSTFLENIKVGDSLELLINISASKSGDTITIKLPNKTNWRKKMENIENQLKEKSKEMGREFYISEFLLELLKENRWAKIRNNTILRARYESEFEAIWNEQVKHYPFLENLDKKTLIEIVSFIFPGEKESQKKYRELGLEKGLKYIIKNQVVFYQRELKDQSHLISDCRYEPNEKAIAKSHPVFQEYKVWEQINKLIVNTKIEAGTNRKGEKKYKYIDRPIPTALKEWIFEELQNKKEITFSAIFKKLKAEFDLREGIDFLNGMSPKDKLKGNETKLQLQKSLGELWDVLGLDSINRQIELWNILYNEKGNEYDLTSDRTSKVLEFINKYGNNIVDDNAEETAIRISKIKFARAYSSLSLKAVERILPLVRAGKYFNNDFSQQLQSKILKLLNENVEDPFAKAAQTYLDNNQSVLSEGGVGNSIATILVYDKHTAKEYSHDELYKSYKEINLLKQGDLRNPLVEQIINEALVLIRDIWKNYGIKPNEIRVELARDLKNSAKERATIHKRNKDNQTINNKIKETLVKNKKELSLANIEKVKLWEAQRHLSPYTGQPIPLSDLFDKEKYDVDHIIPISRYFDDSFTNKVISEKSVNQEKANRTAMEYFEVGSLKYSIFTKEQFIAHVNEYFSGVKRKNLLATSIPEDPVQRQIKDTQYIAIRVKEELNKIVGNENVKTTTGSITDYLRNHWGLTDKFKLLLKERYEALLESEKFLEAEYDNYKKDFDSRKKEYEEKEVLFEEQELTREEFIKEYKENYIRYKKNKLIIKGWSKRIDHRHHAIDALIVACTEPAHIKRLNDLNKVLQDWLVEHKSEFMPNFEGSNSELLEEILSLPENERTEIFTQIEKFRAIEMPWKGFPEQVEQKLKEIIISHKPKDKLLLQYNKAGDRQIKLRGQLHEGTLYGISQGKEAYRIPLTKFGGSKFATEKNIQKIVSPFLSGFIANHLKEYNNKKEEAFSAEGIMDLNNKLAQYRNEKGELKPHTPISTVKIYYKDPSKNKKKKDEEDLSLQKLDREKAFNEKLYVKTGDNYLFAVLEGEIKTKKTSQIKRLYDIISFFDATNFLKEEFRNAPDKKTFDKDLLFRQYFEERNKAKLLFTLKQGDFVYLPNENEEVILDKESPLYNQYWGDLKERGKNIYVVQKFSKKQIYFIKHTIADIIKKDVEFGSQNCYETVEGRSIKENCFKLEIDRLGNIVKVIKR

SEQ ID NO: 311 - protein, 1430 aa, Bergeyella zoohelcum
MKHILGLDLGTNSIGWAVVKEAQNDNEQSEIVDVGVRVNPLTTDEKTNFEKGKPISTNADRTLKRSARRNLQRYKLRRKELIELLKEHQLISTDTILTENGKGTTFQTLELRAKSAKEKISLEELARVFLTINKKRGYKSSRKAKNEDEGQLIDGMEIAKRLYEENLTTGQLSLQLLKEGKKSLPDYYRSDLQFELDKVWNFQKQFHSDILTDEFYAQLKGKGQRATSALFLAKYQIYTAENKGSREDKKLQAYQWRVDALSKELTREQLAFVITEINNNLNNSSGYLGAISDRSKELYFNNETVGEYLWKQIAANPHTSLKNQVFYRQDYLDEFEQIWKTQSAFYPEILTDELKKELRDVVIFYQRKLKSQKSLVSFCEFENKEIEIKKEDGTSTKKVIGLKVAPKSSPLFQEFKIWQNLNNVLIRKKGSKTKKVAKNQQAVLFEEEKTISELDLEAKQALFNELNLKGNLKADYCLEILGYSPKEWEMNYSVLEGNRTNKALYEAYLKITDLEGYDAKNHLKVKLNKDEVELDDLKVPASEIKDMVQAIFKEAGINTDILHFNAELDGKDFENQASYQLWHLLYSYEGDDSKSGNELLYKLLETKFGFKKEYAQILANVSLSDDYGSLSTKAMRKIHPYIKENKFSTACELAGYRHSKHSLTKEENDNRVLKDSLEVLKKNSLRQPVVEKILNQMINLVNALLKKYRTENPNFKFDEIRIELARELKKNAEERANMTANINKAKTEHEKIIKILKNEFGLPNPTRNDIIRYRLYEELKANGYKDLYTNIKIPQEKLFTKEIDIEHIIPKSRVFDDSFSNKTLSFRKTNLDKGERTAFDYMESKFGADKLEEYVARVEDLYKNNIISKAKYQKLLKKESEIGDGFVERDLRETQYIAKKAKEILLQITPNVLSTSGGITDRLREDWDLINVMKELNLPKYRALGLTQMEDRKYGQQVEVITDWTKRNDHRHHAMDALTVAFTKHNHIQYLNYLNARKNEKHKEHSNIMGIQQLETIKVTDKNGNEKRVFKAPMPNFRQVTKAFLENILISHKAKNKVVTKNKNKVAGSNKVQEVLTPRGQLHKETVYGKYQYYVQKEEKIGAKFDLETIKKVANPLYQSLLKKRLEENGGDPKKAFTGKNSLAKNPIYLDDTQTEQLPEKVKLVWLENSFSIRKDITPENFKDEKLIDKILDEGVKRILKERLQSFGNDAKKAFSDLDKNPIWLNKEKGITIKRVTISGVANAEPLHTKKDHLGKEILDKEGKPIPVDFISTGSNHHVAVYRDEKGNLQEKVVSVFEAVVRANQGLPIIDKTYNQHLGWEFLFTMKQNEMFVFPNESTGFNPNDIDLLDPKNKRIISPNLFRVQKFSKLQYGNSFVREFVFRHHLETTVEDRKELQGITYKQMKNSTFFNDIIKVRINHLGDIVSIGEY

SEQ ID NO: 312 - protein, 1281 aa, Bifidobacterium bifidum
MEDDSQHDIREIYLAIHHMVKYRGNFLVEGTLESSNAFKEDELLKLLGRITRYEMSEGEQNSDIEQDDENKLVAPANGQLADALCATRGSRSMRVDNALEALSAVNDLSREQRAIVKAIFAGLEGNKLDLAKIFVSKEFSSENKKILGIYFNKSDYEEKCVQIVDSGLLDDEEREFLDRMQGQYNAIALKQLLGRSTSVSDSKCASYDAHRANWNLIKLQLRTKENEKDINENYGILVGWKIDSGQRKSVRGESAYENMRKKANVFFKKMIETSDLSETDKNRLIHDIEEDKLFPIQRDSDNGVIPHQLHQNELKQIIKKQGKYYPFLLDAFEKDGKQINKIEGLLAFRVPYFVGPLVVPEDLQKSDNSENHWMVRKKKGEITPWNFDEMVDKDASGRKFIERLVGTDSYLLGEPTLPKNSLLYQEYEVLNELNNVRLSVRTGNHWNDKRRMRLGREEKTLLCQRLFMKGQTVTKRTAENLLRKEYGRTYELSGLSDESKFTSSLSTYGKMCRIFGEKYVNEHRDLMEKIVELQTVFEDKETLLHQLRQLEGISEADCALLVNTHYTGWGRLSRKLLTTKAGECKISDDFAPRKHSIIEIMRAEDRNLMEIITDKQLGFSDWIEQENLGAENGSSLMEVVDDLRVSPKVKRGIIQSIRLIDDISKAVGKRPSRIFLELADDIQPSGRTISRKSRLQDLYRNANLGKEFKGIADELNACSDKDLQDDRLFLYYTQLGKDMYTGEELDLDRLSSAYDIDHIIPQAVTQNDSIDNRVLVARAENARKTDSFTYMPQIADRMRNFWQILLDNGLISRVKFERLTRQNEFSEREKERFVQRSLVETRQIMKNVATLMRQRYGNSAAVIGLNAELTKEMHRYLGFSHKNRDINDYHHAQDALCVGIAGQFAANRGFFADGEVSDGAQNSYNQYLRDYLRGYREKLSAEDRKQGRAFGFIVGSMRSQDEQKRVNPRTGEVVWSEEDKDYLRKVMNYRKMLVTQKVGDDFGALYDETRYAATDPKGIKGIPFDGAKQDTSLYGGFSSAKPAYAVLIESKGKTRLVNVTMQEYSLLGDRPSDDELRKVLAKKKSEYAKANILLRHVPKMQLIRYGGGLMVIKSAGELNNAQQLWLPYEEYCYFDDLSQGKGSLEKDDLKKLLDSILGSVQCLYPWHRFTEEELADLHVAFDKLPEDEKKNVITGIVSALHADAKTANLSIVGMTGSWRRMNNKSGYTFSDEDEFIFQSPSGLFEKRVTVGELKRKAKKEVNSKYRTNEKRLPTLSGASQP

SEQ ID NO: 313 - protein, 1121 aa, Bifidobacterium dentium
MSVGLAAIEVDETGFPIRILNIQSVIHDGGIDPQLGKKKSISRKAISGVARRTRRMRRRKVVRLRQLDATLESLGFPIVEPDSLDTWEIWLTRAKLASSYIQDDETRKEDVSIALRHIARHRGWRNPYSNVESLFVDVAPSEQYEELRRKAEEKLGTSLSGNPTSAEIVECILKRQVGEVQLRTRSRKGVNGNAVEKEGLLPTKLMQSDNAAEIRRIFKVQRIDDETGRKLLRAVFKACSPKGSVERRVGRDALAPGLPRALKASLAFQEYRIANVLTNLVISEDGTKRKLTIAEKQRVFGFLSSNETDDITWIDVAEKLGLERRQIQGVGCLTADGEERISSTPPRNITALHIHSAKPVIREKLVAWWKAASPTVRETMVELLSNTVDIDRVREDMDYSSAVAFIDSLGDEELTALDSVDLLSGRAAYSRQTLKQLTERMLNTDDDLHEARKAVFGVDDNWKPPVDAISTSVGNPAVDRVLKIVNRYLLACQKRWRNPQSVQIEHVRESFSSVAKAKETERVQGERARYRNDLRRELCEQEGLNKIRESDIRRWESVQRQNGTCLYCGSPITFRTCEMDHIVPRKGVGSTNTRVNLAAACAACNKLKSNTAFSVWARTEGAANRKVSQRDAIERVKTFIFNKSVPPREQRAFKQAVISRLRQAESDPAIDNRSIESVAWMADELHRRIEAYFNQDADVSGNTPATQVWVFQGRVTALARKASGIEGRIHFAGEWKKTRLDRRHHAVDAAVIAMMNHSAAQTLVERDSLRLSQWITRKPETWKNYPFSEGQKKTRFKEWLDCMNALLDLLNDALDSDRVPVTRCQRMSLGNSQAHAATIRKMKRVELFSPMDADLIRRASTPALYCALTRLPEYSPEKGLPENRGREIVLNGRHIRSTETVDFFASGAAQLMVRNGSAEIGDSIHHMRIYRYRKTGAKSQEYVYGMIRVFQIDLLHASSENLFAVQLPSQSVSVRYGDKNVVQAIQEGRAEYLGHIVPNDEILISYEGVRMKDSEKIGAYANDFSGTASELAQRRHWVVVGSDVSKLALRPSYLSEEGLENSGSESERLSKQTRKVIEGKGWVVAVNILAKYHPVVIRRNALGEPRFRTNSGMPVSWRWDR

SEQ ID NO: 314 - protein, 354 aa, Bifidobacterium longum
AKQYVNSASIDDAEAETMKTTVSVFQGRVTASARRAAGIEGKIHFIGQQSKTRLDRRHHAVDASVIAMMNTAAAQTLMERESLRESQRLIGLMPGERSWKEYPYEGTSRYESFHLWLDNMDVLLELLNDALDNDRIAVMQSQRYVLGNSIAHDATIHPLEKVPLGSAMSADLIRRASTPALWCALTRLPDYDEKEGLPEDSHREIRVHDTRYSADDEMGFFASQAAQIAVQEGSADIGSAIHHARVYRCWKTNAKGVRKYFYGMIRVFQTDLLRACHDDLFTVPLPPQSISMRYGEPRVVQALQSGNAQYLGSLVVGDEIEMDFSSLDVDGQIGEYLQFFSQFSGGNLAWKHWV

SEQ ID NO: 315 - protein, 1124 aa, Bifidobacterium longum
LTGHSGHTFWPTSSSPPIQLEQEKRPLPQRNTSQNGHTFWPITRERCFMRGKRYRIGIDVGLNSVGLAAVEVSDENSPVRLLNAQSVIHDGGVDPQKNKEAITRKNMSGVARRTRRMRRRKRERLHKLDMLLGKFGYPVIEPESLDKPFEEWHVRAELATRYIEDDELRRESISIALRHMARHRGWRNPYRQVDSLISDNPYSKQYGELKEKAKAYNDDATAAEEESTPAQLVVAMLDAGYAEAPRLRWRTGSKKPDAEGYLPVRLMQEDNANELKQIFRVQRVPADEWKPLFRSVFYAVSPKGSAEQRVGQDPLAPEQARALKASLAFQEYRIANVITNLRIKDASAELRKLTVDEKQSIYDQLVSPSSEDITWSDLCDFLGFKRSQLKGVGSLTEDGEERISSRPPRLTSVQRIYESDNKIRKPLVAWWKSASDNEHEAMIRLLSNTVDIDKVREDVAYASAIEFIDGLDDDALTKLDSVDLPSGRAAYSVETLQKLTRQMLTTDDDLHEARKTLFNVTDSWRPPADPIGEPLGNPSVDRVLKNVNRYLMNCQQRWGNPVSVNIEHVRSSFSSVAFARKDKREYEKNNEKRSIFRSSLSEQLRADEQMEKVRESDLRRLEAIQRQNGQCLYCGRTITFRTCEMDHIVPRKGVGSTNTRTNFAAVCAECNRMKSNTPFAIWARSEDAQTRGVSLAEAKKRVTMFTFNPKSYAPREVKAFKQAVIARLQQTEDDAAIDNRSIESVAWMADELHRRIDWYFNAKQYVNSASIDDAEAETMKTTVSVFQGRVTASARRAAGIEGKIHFIGQQSKTRLDRRHHAVDASVIAMMNTAAAQTLMERESLRESQRLIGLMPGERSWKEYPYEGTSRYESFHLWLDNMDVLLELLNDALDNDRIAVMQSQRYVLGNSIAHDATIHPLEKVPLGSAMSADLIRRASTPALWCALTRLPDYDEKEGLPEDSHREIRVHDTRYSADDEMGFFASQAAQIAVQEGSADIGSAIHHARVYRCWKTNAKGVRKYFYGMIRVFQTDLLRACHDDLFTVPLPPQSISMRYGEPRVVQALQSGNAQYLGSLVVGDEIEMDFPVSMLMVRLASIYNSSRSLVEGTLHGNIGLLMDSLTRRS

SEQ ID NO: 316 - protein, 166 aa, Bifidobacterium longum
MGLAAVEVSDENSPVRLLNAQSVIHDGGVDPQKNKEAITRKNMSGVARRTRRMRRRKRERLHKLDMLLGKFGYPVIEPESLDKPFEEWHVRAELATRYIEDDELRRESISIALRHMARHRGWRNPYRQVDSLISDNPYSKQYGELKEKAKAYNDDATAAEEESTPA

SEQ ID NO: 317 - protein, 1138 aa, Bifidobacterium longum
MNSVGLAAVEVSDENSPVRLLNAQSVIHDGGVDPQKNKEAITRKNMSGVARRTRRMRRRKRERLHKLDMLLGKFGYPVIEPESLDKPFEEWHVRAELATRYIEDDELRRESISIALRHMARHRGWRNPYRQVDSLISDNPYSKQYGELKEKAKAYNDDATAAEEESTPAQLVVAMLDAGYAEAPRLRWRTGSKKPDAEGYLPVRLMQEDNANELKQIFRVQRVPADEWKPLFRSVFYAVSPKGSAEQRVGQDPLAPEQARALKASLAFQEYRIANVITNLRIKDASAELRKLTVDEKQSIYDQLVSPSSEDITWSDLCDFLGFKRSQLKGVGSLTEDGEERISSRPPRLTSVQRIYESDNKIRKPLVAWWKSASDNEHEAMIRLLSNTVDIDKVREDVAYASAIEFIDGLDDDALTKLDSVDLPSGRAAYSVETLQKLTRQMLTTDDDLHEARKTLFNVTDSWRPPADPIGEPLGNPSVDRVLKNVNRYLMNCQQRWGNPVSVNIEHVRSSFSSVAFARKDKREYEKNNEKRSIFRSSLSEQLRADEQMEKVRESDLRRLEAIQRQNGQCLYCGRTITFRTCEMDHIVPRKGVGSTNTRTNFAAVCAECNRMKSNTPFAIWARSEDAQTRGVSLAEAKKRVTMFTFNPKSYAPREVKAFKQAVIARLQQTEDDAAIDNRSIESVAWMADELHRRIDWYFNAKQYVNSASIDDAEAETMKTTVSVFQGRVTASARRAAGIEGKIHFIGQQSKTRLDRRHHAVDASVIAMMNTAAAQTLMERESLRESQRLIGLMPGERSWKEYPYEGTSRYESFHLWLDNMDVLLELLNDALDNDRIAVMQSQRYVLGNSIAHDATIHPLEKVPLGSAMSADLIRRASTPALWCALTRLPDYDEKEGLPEDSHREIRVHDTRYSADDEMGFFASQAAQIAVQEGSADIGSAIHHARVYRCWKTNAKGVRKYFYGMIRVFQTDLLRACHDDLFTVPLPPQSISMRYGEPRVVQALQSGNAQYLGSLVVGDEIEMDFSSLDVDGQIGEYLQFFSQFSGGNLAWKHWVVDGFFNQTQLRIRPRYLAAEGLAKAFSDDVVPDGVQKIVTKQGWLPPVNTASKTAVRIVRRNAFGEPRLSSAHHMPCSWQWRHE

SEQ ID NO: 318 - protein, 182 aa, Bifidobacterium longum
MRGKRYRIGIDVGLNSVGLAAVEVSDENSPVRLLNAQSVIHDGGVDPQKNKEAITRKNMSGVARRTRRMRRRKRERLHKLDMLLGKFGYPVIEPESLDKPFEEWHVRAELATRYIEDDELRRESISIALRHMARHRGWRNPYRQVDSLISDNPYSKQYGELKEKAKAYNDDATAAEEESTPA

SEQ ID NO: 319 - protein, 441 aa, Bifidobacterium longum
MVAMLDAGYAEAPRLRWRTGSKKPDAEGYLPVRLMQEDNANELKQIFRVQRVPADEWKPLFRSVFYAVSPKGSAEQRVGQDPLAPEQARALKASLAFQEYRIANVITNLRIKDASAELRKLTVDEKQSIYDQLVSPSSEDITWSDLCDFLGFKRSQLKGVGSLTEDGEERISSRPPRLTSVQRIYESDNKIRKPLVAWWKSASDNEHEAMIRLLSNTVDIDKVREDVAYASAIEFIDGLDDDALTKLDSVDLPSGRAAYSVETLQKLTRQMLTTDDDLHEARKTLFNVTDSWRPPADPIGEPLGNPSVDRVLKNVNRYLMNCQQRWGNPVSVNIEHVRSSFSSVAFARKDKREYEKNNEKRSIFRSSLSEQLRADEQMEKVRESDLRRLEAIQRQNGQCLYCGRTITFRTCEMDHIVPRKGVGSTNTRTNFAAVCAECNRM

SEQ ID NO: 320 - protein, 967 aa, Bifidobacterium longum
MVAMLDAGYAEAPRLRWRTGSKKPDAEGYLPVRLMQEDNANELKQIFRVQRVPADEWKPLFRSVFYAVSPKGSAEQRVGQDPLAPEQARALKASLAFQEYRIANVITNLRIKDASAELRKLTVDEKQSIYDQLVSPSSEDITWSDLCDFLGFKRSQLKGVGSLTEDGEERISSRPPRLTSVQRIYESDNKIRKPLVAWWKSASDNEHEAMIRLLSNTVDIDKVREDVAYASAIEFIDGLDDDALTKLDSVDLPSGRAAYSVETLQKLTRQMLTTDDDLHEARKTLFNVTDSWRPPADPIGEPLGNPSVDRVLKNVNRYLMNCQQRWGNPVSVNIEHVRSSFSSVAFARKDKREYEKNNEKRSIFRSSLSEQLRADEQMEKVRESDLRRLEAIQRQNGQCLYCGRTITFRTCEMDHIVPRKGVGSTNTRTNFAAVCAECNRMKSNTPFAIWARSEDAQTRGVSLAEAKKRVTMFTFNPKSYAPREVKAFKQAVIARLQQTEDDAAIDNRSIESVAWMADELHRRIDWYFNAKQYVNSASIDDAEAETMKTTVSVFQGRVTASARRAAGIEGKIHFIGQQSKTRLDRRHHAVDASVIAMMNTAAAQTLMERESLRESQRLIGLMPGERSWKEYPYEGTSRYESFHLWLDNMDVLLELLNDALDNDRIAVMQSQRYVLGNSIAHDATIHPLEKVPLGSAMSADLIRRASTPALWCALTRLPDYDEKEGLPEDSHREIRVHDTRYSADDEMGFFASQAAQIAVQEGSADIGSAIHHARVYRCWKTNAKGVRKYFYGMIRVFQTDLLRACHDDLFTVPLPPQSISMRYGEPRVVQALQSGNAQYLGSLVVGDEIEMDFSSLDVDGQIGEYLQFFSQFSGGNLAWKHWVVDGFFNQTQLRIRPRYLAAEGLAKAFSDDVVPDGVQKIVTKQGWLPPVNTASKTAVRIVRRNAFGEPRLSSAHHMPCSWQWRHE

SEQ ID NO: 321 - protein, 1151 aa, Bifidobacterium sp.
MRGKRYRIGIDVGLNSVGLAAVEVSDENSPVRLLNAQSVIHDGGVDPQKNKEAITRKNMSGVARRTRRMRRRKRERLHKLDMLLGKFGYPVIEPESLDKPFEEWHVRAELATRYIEDDELRRESISIALRHMARHRGWRNPYRQVDSLISDNPYSKQYGELKEKAKAYNDDATAAEEESTPAQLVVAMLDAGYAEAPRLRWRTGSKKPDAEGYLPVRLMQEDNANELKQIFRVQRVPADEWKPLFRSVFYAVSPKGSAEQRVGQDPLAPEQARALKASLAFQEYRIANVITNLRIKDASAELRKLTVDEKQSIYDQLVSPSSEDITWSDLCDFLGFKRSQLKGVGSLTEDGEERISSRPPRLTSVQRIYESDNKIRKPLVAWWKSASDNEHEAMIRLLSNTVDIDKVREDVAYASAIEFIDGLDDDALTKLDSVDLPSGRAAYSVETLQKLTRQMLTTDDDLHEARKTLFNVTDSWRPPADPIGEPLGNPSVDRVLKNVNRYLMNCQQRWGNPVSVNIEHVRSSFSSVAFARKDKREYEKNNEKRSIFRSSLSEQLRADEQMEKVRESDLRRLEAIQRQNGQCLYCGRTITFRTCEMDHIVPRKGVGSTNTRTNFAAVCAECNRMKSNTPFAIWARSEDAQTRGVSLAEAKKRVTMFTFNPKSYAPREVKAFKQAVIARLQQTEDDAAIDNRSIESVAWMADELHRRIDWYFNAKQYVNSASIDDAEAETMKTTVSVFQGRVTASARRAAGIEGKIHFIGQQSKTRLDRRHHAVDASVIAMMNTAAAQTLMERESLRESQRLIGLMPGERSWKEYPYEGTSRYESFHLWLDNMDVLLELLNDALDNDRIAVMQSQRYVLGNSIAHDATIHPLEKVPLGSAMSADLIRRASTPALWCALTRLPDYDEKEGLPEDSHREIRVHDTRYSADDEMGFFASQAAQIAVQEGSADIGSAIHHARVYRCWKTNAKGVRKYFYGMIRVFQTDLLRACHDDLFTVPLPPQSISMRYGEPRVVQALQSGNAQYLGSLVVGDEIEMDFSSLDVDGQIGEYLQFFSQFSGGNLAWKHWVVDGFFNQTQLRIRPRYLAAEGLAKAFSDDVVPDGVQKIVTKQGWLPPVNTASKTAVRIVRRNAFGEPRLSSAHHMPCSWQWRHE

SEQ ID NO: 322 - protein, 1092 aa, Brevibacillus laterosporus
MAYTMGIDVGIASCGWAIVDLERQRIIDIGVRTFEKAENPKNGEALAVPRREARSSRRRLRRKKHRIERLKYMFVRNGLAVDIQHLEQTLRSQNEIDVWQLRVDGLDRMLTQKEWLRVLIHLAQRRGFQSNRKTDGSSEDGQVLVNVTENDRLMEEKDYRTVAEMMVKDEKFSDHKRNKNGNYHGVVSRASLLVEIHTLFESQRQHHNFLASKDFELEYINIWSSQRPVATKDQIEKMIGTCTFLPKEKRAPKASWHFQYFMLLQTINHIRITNAQGTRPLNKEEIEQVVNMALTKSKVSYHDIRKVLDLSEEYQFVGLDYGKEDEKKKVESKETIIKLDDYHKLNKIFNEVELAKGETWEAVDYDTVAYALTFFKDDEDIRDYLQNKYKDSKNRLVKNVANKEYTNELIEKVSTLSFRKVGHLSLKALRKIIPFLEQGMTYDKACQAAGFNFQGISKKKRSVVLPVIDQISNPVVNRALTQTRKVINALIKKYGSPETIHIETARELSKRFDERKNITKDYKENRDKNERAKKHLSELGIINPTGLDIVKYKLWCEQQGRCMYSNQPISFERLRESGYTEVDHIIPYSRSMNDSYNNRVLVMTRENREKSNQTPYEYMGNDTQRWDEFEQRVTTNPQIKKEKRQNLLLKGFTNRRELEMLERNLNDTRHITKYLSHFISTNLEFSPSDKKKKVVNTSGRITSHLRSRWGLEKNREQNDLHHAMDAVVIAVTSDSFIQQVTNYYKRKERRELNGDDKFPLPWKFFREEVIARLSPNPKEQIEALPNHFYSEDELADLQPIFVSRMPKRSITGEAHQAQFRRVVGKTKEGKNITAKKTALVDISYDKNGDFNMYGRETDPATYEAIKERYLEFGGNAKKAFSTDLHKPKKDGTKGPLIKSVRIMENKTLVHPVNKGKGVVYNSSIVRTDVFQRKEKYYLLPVYVTDVTKGKLPNKVIAAKKGYDDWIEVDDSFTFLYSLYPNDLIFIRQNPKKKISLKKRIESHSISDSKEVQEILTYYKGVDSSTAAIEFITHDGSYYAKGVGVQNLDCFEKYQVDILGNYSKVKGEKRLELETSDNNHKGKDVNSIKSTSR

SEQ ID NO: 323 - protein, 103 aa, Butyrivibrio fibrisolvens
MISVGQSRKDLEDLGYEFKLSFYKEDIIEYEKNGDILVERFLSRTMPQVRNYIETKPIDRPKYDKRNPVGLSKTSSIRKITMDILGNRFYVDKMSFNNVVGTQ

SEQ ID NO: 324 - protein, 177 aa, Butyrivibrio fibrisolvens
MLIAFSQMGYDAYHELTNKYIDFETGEIIDKEGFNELLNNDLVYKNTMYESKWLKIKGNIEKAAEKNKYWYQVNKKCNRGLCNQTVYGTRESDGDVYKISKIDIRTDDGFKKFKNIVDKGNESVFLMYENDPKTFELIMDIYKNYSDSKNPFVQYEKETGDIIRKYSKKITGQRFLN

SEQ ID NO: 325 - protein, 1442 aa, Caenispirillum salinarum
MPVLSPLSPNAAQGRRRWSLALDIGEGSIGWAVAEVDAEGRVLQLTGTGVTLFPSAWSNENGTYVAHGAADRAVRGQQQRHDSRRRRLAGLARLCAPVLERSPEDLKDLTRTPPKADPRAIFFLRADAARRPLDGPELFRVLHHMAAHRGIRLAELQEVDPPPESDADDAAPAATEDEDGTRRAAADERAFRRLMAEHMHRHGTQPTCGEIMAGRLRETPAGAQPVTRARDGLRVGGGVAVPTRALIEQEFDAIRAIQAPRHPDLPWDSLRRLVLDQAPIAVPPATPCLFLEELRRRGETFQGRTITREAIDRGLTVDPLIQALRIRETVGNLRLHERITEPDGRQRYVPRAMPELGLSHGELTAPERDTLVRALMHDPDGLAAKDGRIPYTRLRKLIGYDNSPVCFAQERDTSGGGITVNPTDPLMARWIDGWVDLPLKARSLYVRDVVARGADSAALARLLAEGAHGVPPVAAAAVPAATAAILESDIMQPGRYSVCPWAAEAILDAWANAPTEGFYDVTRGLFGFAPGEIVLEDLRRARGALLAHLPRTMAAARTPNRAAQQRGPLPAYESVIPSQLITSLRRAHKGRAADWSAADPEERNPFLRTWTGNAATDHILNQVRKTANEVITKYGNRRGWDPLPSRITVELAREAKHGVIRRNEIAKENRENEGRRKKESAALDTFCQDNTVSWQAGGLPKERAALRLRLAQRQEFFCPYCAERPKLRATDLFSPAETEIDHVIERRMGGDGPDNLVLAHKDCNNAKGKKTPHEHAGDLLDSPALAALWQGWRKENADRLKGKGHKARTPREDKDFMDRVGWRFEEDARAKAEENQERRGRRMLHDTARATRLARLYLAAAVMPEDPAEIGAPPVETPPSPEDPTGYTAIYRTISRVQPVNGSVTHMLRQRLLQRDKNRDYQTHHAEDACLLLLAGPAVVQAFNTEAAQHGADAPDDRPVDLMPTSDAYHQQRRARALGRVPLATVDAALADIVMPESDRQDPETGRVHWRLTRAGRGLKRRIDDLTRNCVILSRPRRPSETGTPGALHNATHYGRREITVDGRTDTVVTQRMNARDLVALLDNAKIVPAARLDAAAPGDTILKEICTEIADRHDRVVDPEGTHARRWISARLAALVPAHAEAVARDIAELADLDALADADRTPEQEARRSALRQSPYLGRAISAKKADGRARAREQEILTRALLDPHWGPRGLRHLIMREARAPSLVRIRANKTDAFGRPVPDAAVWVKTDGNAVSQLWRLTSVVTDDGRRIPLPKPIEKRIEISNLEYARLNGLDEGAGVTGNNAPPRPLRQDIDRLTPLWRDHGTAPGGYLGTAVGELEDKARSALRGKAMRQTLTDAGITAEAGWRLDSEGAVCDLEVAKGDTVKKDGKTYKVGVITQGIFGMPVDAAGSAPRTPEDCEKFEEQYGIKPWKAKGIPLA

SEQ ID NO: 326 - protein, 984 aa, Campylobacter coli
MARILAFDIGISSIGWAFSENDELKDCGVRIFTKAENPKTGESLALPRRLARSARKCLARRKARLNHLKHLIANEFKLNYEDYQSFDESLAKAYKGSLISPYELRFRALNELLSKQDFARVILHIAKRRGYDDIKNNGDEEKSEILKAIKQNEEKLVNYQSVGEYLYKEYFQKFKENSKEFINVRNKKESYERCIAQSFLKDELKLIFQKQREFGFSFSKKFEEEVLSVAFYKRALKDFSHLVGNCSFFTDEKRAPKNSPLAFMFVALTRIINLLNNLKNTEGILYTKDDLNALLNEVLKNGTLTYKQTKKLLGLSDDYEFKGEKGTYFIEFKKYKEFIKALGEHNLSQDDLNEIAKDITLIKDEIKLKKALAKYDLNQNQIDSLSKLEFKDHLNISFKALKLITPLMLEGKKYDEACNELNLKVAINEDKKDFLPAFNETYYKDEVTNPVVLRAIKEYRKVLNALLKKYGKVHKINIELAREVGKNHSQRAKIEKEQNENYKAKKDAELECEKLGLKINSKNILKLRLFKEQKEFCAYSGEKIKISDLQDEKMLEIDHIYPYSRSFDDSYMNKVLVFTKQNQEKLNQTPFEAFGNDSAKWQKIEVLAKNLPTKKQKRILDKNYKDKEQKNFKDRNLNDTRYIARLVLNYTKDYLDFLPLSDDENTKLNDTQKGSKVHVEAKSGMLTSALRHTWGFSAKDRNNHLHHAIDAVIIAYANNSIVKAFSDFKKEQESNSAELYAKKISELDYKNKRKFFEPFSGFRQKVLDKIDEIFVSKPERKKPSGALHEETFRKEEEFYQSYGGKEGVLKALELGKIRKVNGKIVKNGDMFRVDIFKHKKTNKFYAVPIYTMDFALKVLPNKAVARSKKGEIKDWILMDENYEFCFSLYKDSLILIQTKDMQEPEFVYYNAFTSSTVSLIVSKHDNKFETLSKNQKILFKNANEKEVIAKSIGIQNLKVFEKYIVSALGEVTKAEFRQREDFKK

SEQ ID NO: 327 - protein, 984 aa, Campylobacter coli
MARILAFDIGISSIGWAFSENDELKDCGVRIFTKAENPKTGESLALPRRLARSARKRLARRKARLNHLKHLIANEFKLNYEDYQSFDESLAKAYKGSLISPYELRFRALNELLSKQDFARVILHIAKRRGYDDIKNNGDEEKGKILKAIKQNEEKLVNYQSVGEYLYKEYFQKFKENSKEFINVRNKKESYERCITQSFLKYELKLIFQKQREFGFSFSKKFEEEVLSVAFYKRALKDFSHLVGNCSFFSDEKRAPKNSPLAFMFVALTRIINLLNNLKNTEGILYTKDDLNALLNEVLKNGTLTYKQTKKLLGLSDDYEFKGEKGTYFIEFKKYKEFIKALGEHNLSQDDLNEIAKDITLIKDEIKLKKALAKYDLNQNQIDSLSKLEFKDHLNISFKALKLITPLMLEGKKYDEACNELNLKVAINEDKKDFLPAFNETYYKDEVTNPVVLRAIKEYRKVLNALLKKYGKVHKINIELAREVGKNYSQRAKIEKEQNENYKAKKDAELECEKLGLKINSKNILKLRLFKEQKEFCAYSGEKIKISDLQDEKMLEIDHIYPYSRSFDDSYMNKVLVFTKQNQEKLNQTPFEAFGNDSAKWQKIEVLAKNLPTKKQKRILDKNYKDKEQKNFKDRNLNDTRYIARLVLNYTKDYLDFLPLSDDENTKLNDTQKGSKVHVEAKSGMLTSALRHTWGFSAKDRNNHLHHAIDAVIIAYANNSIVKAFSDFKKEQESNSAELYAKKISELDYKNKRKFFEPFSGFRQKVLDKIDEIFVSKPERKKPSGALHEETFRKEEEFYQSYGGKEGVLKALELGKIRKVNGKIVKNGDMFRVDIFKHKKTNKFYAVPIYTMDFALKVLPNKAVARSKKGEIKDWILMDENYEFCFSLYKDSLILIQTKDMQEPEFVYYNAFTSSTVSLIVSKHDNKFETLSKNQKILFKNANEKEVIAKSIGIQNLKVFEKYIVSALGEVTKAEFRQREDFKK

SEQ ID NO: 328 - protein, 984 aa, Campylobacter coli
MARILAFDIGISSIGWAFSENDELKDCGVRIFTKAENPKTGESLALPRRLARSARKRLARRKARLNHLKHLIANEFKLNYEDYQSFDESLAKAYKGSLISPYELRFRALNELLSKQDFARVILHIAKRRGYDDIKNNGDEEKSEILKAIKQNEEKLVNYQSVGEYLYKEYFQKFKENSKEFINVRNKKESYERCIAQSFLKDELKLIFQKQREFGFSFSKKFEEEVLSVAFYKRALKDFSHLVGNCSFFTDEKRAPKNSPLAFMFVALTRIINLLNNLKNTEGILYTKDDLNTLLNEVLKNGTLTYKQTKKLLGLSDDYEFKGEKGTYFIEFKKYKEFIKALGEHNLSQDNLNEIAKDITLIKDEIKLKKALAKYDLNQNQIDSLSKLEFKDHLNISFKALKLITPLMLEGKKYDEAYNELNLKVAINEDKKDFLPAFNETYYKDEVTNPVVLRAIKEYRKVLNALLKKYGKVHKINIELAREVGKNHSQRAKIEKEQNENYKAKKDAELECEKLGLKINSKNILKLRLFKEQKEFCAYSGEKIKISDLQDEKMLEIDHIYPYSRSFDDSYMNKVLVFTKQNQEKLNQTPFEAFGNDSAKWQKIEVLAKNLPTKKQKRILDKNYKDKEQKDFKDRNLNDTRYIARLVLNYTKDYLDFLPLSDDENTKLNDTQKGSKVHVEAKSGMLTSALRHTWGFSAKDRNNHLHHAIDAVIIAYANNSIVKAFSDFKKEQESNSAELYAKKISELDYKNKRKFFEPFSGFRQKVLDKIDEIFVSKPERKKPSGALHEETFRKEEEFYQSYGGKEGVLKALELGKIRKVNGKIVKNGDMFRVDIFKHKKTNKFYAVPIYTMDFALKVLPNKAVARSKKGEIKDWILMDENYEFCFSLYKDSLILIQTKDMQEPELVYFNAFTSSTVSLIVSKHDNKFETLSKNQKILFKNANEKEVIAKSIGIQNLKVFEKYIVSALGEVTKAEFRQREDFKK

SEQ ID NO: 329 - protein, 984 aa, Campylobacter coli
MARILAFDIGISSIGWAFSENDELKDCGVRIFTKAENPKTGESLALPRRLARSARKRLARRKARLNHLKHLIANEFKLNYEDYQSFDESLAKAYKGSLISPYELRFRALNELLSKQDFARVILHIAKRRGYDDIKNNGDEEKSEILKAIKQNEEKLVNYQSVGEYLYKEYFQKFKENSKEFINVRNKKESYERCIAQSFLKDELKLIFQKQREFGFSFSKKFEEEVLSVAFYKRALKDFSHLVGNCSFFTDEKRAPKNSPLAFMFVALTRIINLLNNLKNTEGILYTKDDLNALLNEVLKNGTLTYKQTKKLLGLSDDYEFKGEKGTYFIEFKKYKEFIKALGEHNLSQDDLNEIAKDITLIKDEIKLKKALAKYDLNQNQIDSLSKLEFKDHLNISFKALKLITPLMLEGKKYDEACNELNLKVAINEDKKDFLPAFNETYYKDEVTNPVVLRAIKEYRKVLNALLKKYGKVHKINIELAREVGKNYSQRAKIEKEQNENYKAKKDAELECEKLGLKINSKNILKLRLFKEQKEFCAYSGEKIKISDLQDEKMLEIDHIYPYSRSFDDSYMNKVLVFTKQNQEKLNQTPFEAFGNDSAKWQKIEVLAKNLPTKKQKRILDKNYKDKEQKNFKDRNLNDTRYIARLVLNYTKDYLDFLPLSDDENTKLNDTQKGSKVHVEAKSGMLTSALRHTWGFSAKDRNNHLHHAIDAVIIAYANNSIVKAFSDFKKEQESNSAELYAKKISELDYKNKRKFFEPFSGFRQKVLDKIDEIFVSKPERKKPSGALHEETFRKEEEFYQSYGGKEGVLKALELGKIRKVNGKIVKNGDMFRVDIFKHKKTNKFYAVPIYTMDFALKVLPNKAVARSKKGEIKDWILMDENYEFCFSLYKDSLILIQTKDMQEPEFVYYNAFTSSTVSLIVSKHDNKFETLSKNQKILFKNANEKEVIAKSIGIQNLKVFEKYIVSALGEVTKAEFRQREDFKK

SEQ ID NO: 330 - protein, 987 aa, Campylobacter coli
MARILAFDIGISSIGWAFSENDELKDCGVRIFTKAENPKTGESLALPRRLARSARKRLARRKARLNHLKHLIANEFKLNYEDYQSFDESLAKAYKGSLISPYELRFRALNELLSKQDFARVILHIAKRRGYDDIKNNGDEEKSEILKAIKQNEEKLVNYQSVGEYLYKEYFQKFKENSKEFINVRNKKESYERCIAQSFLKDELKLIFQKQREFGFSFSKKFEEEVLSVAFYKRALKDFSHLVGNCSFFTDEKRAPKNSPLAFMFVALTRIINLLNNLKNTEGILYTKDDLNTLLNEVLKNGTLTYKQTKKLLGLSDDYEFKGEKGTYFIEFKKYKEFIKALGEHNLSQDNLNEIAKDITLIKDEIKLKKALAKYDLNQNQIDSLSKLEFKDHLNISFKALKLITPLMLEGKKYDEAYNELNLKVAINEDKKDFLPAFNETYYKDEVTNPVVLRAIKEYRKVLNALLKKYGKVHKINIELAREVGKNHSQRAKIEKEQNENYKAKKDAELECEKLGLKINSKNILKLRLFKEQKEFCAYSGEKIKISDLQDEKMLEIDHIYPYSRSFDDSYMNKVLVFTKQNQEKLNQTPFEAFGNDSAKWQKIEVLAKNLPTKKQKRILDKNYKDKEQKDFKDRNLNDTRYIARLVLNYTKDYLDFLPLSDDENTKLNDTQKGSKVHVEAKSGMLTSALRHTWGFSAKDRNNHLHHAIDAVIIAYANNSIVKAFSDFKKEQESNSAELYAKKISELDYKNKRKFFEPFSGFRQKVLDKIDEIFVSKPERKKPSGALHEETFRKEEEFYQSYGGKEGVLKALELGKIRKVNGKIVKNGDMFRVDIFKHKKTNKFYAVPIYTMDFALKVLPNKAVARSKKGEIKDWILMDENYEFCFSLYKDSLILIQTKDMQEPELVYFNAFTSSTVSLIVSKHDNKFETLSKNQKILFKNANEKEVIAKSIGIQNLKVFEKYIVSALGEVTKAEFRQREDFKNELR

SEQ ID NO: 331 - protein, 984 aa, Campylobacter coli
MARILAFDIGISSIGWAFSENDELKDCGVRIFTKAENPKTGESLALPRRLARSARKRLARRKARLNHLKHLIANEFKLNYEDYQSFDESLAKAYKGSLISPYELRFRALNELLSKQDFARVILHIAKRRGYDDIKNNGDEEKSEILKAIKQNEEKLVNYQSVGEYLYKEYFQKFKENSKEFINVRNKKESYERCIAQSFLKDELKLIFQKQREFGFSFSKKFEEEVLSVAFYKRALKDFSHLVGNCSFFTDEKRAPKNSPLAFMFVALTRIINLLNNLKNTEGILYTKDDLNTLLNEVLKNGTLTYKQTKKLLGLSDDYEFKGEKGTYFIEFKKYKEFIKALGEHNLSQDNLNEIAKDITLIKDEIKLKKALAKYDLNQNQIDSLSKLEFKDHLNISFKALKLITPLMLEGKKYDEAYNELNLKVAINEDKKDFLPAFNETYYKDEVTNPVVLRAIKEYRKVLNALLKKYGKVHKINIELAREVGKNHSQRAKIEKEQNENYKAKKDAELECEKLGLKINSKNILKLRLFKEQKEFCAYSGEKIKISDLQDEKMLEIDHIYPYSRSFDDSYMNKVLVFTKQNQEKLNQTPFEAFGNDSAKWQKIEVLAKNLPTKKQKRILDKNYKDKEQKDFKDRNLNDTRYIARLVLNYTKDYLDFLPLSNDENTKLNDTQKGSKVHVEAKSGMLTSALRHTWGFSAKDRNNHLHHAIDAVIIAYANNSIVKAFSDFKKEQESNSAELYAKKISELDYKNKRKFFEPFSGFRQKVLDKIDEIFVSKPERKKPSGALHEETFRKEEEFYQSYGGKEGVLKALELGKIRKVNGKIVKNGDMFRVDIFKHKKTNKFYAVPIYTMDFALKVLPNKAVARSKKGEIKDWILMDENYEFCFSLYKDSLILIQTKDMQEPELVYFNAFTSSTVSLIVSKHDNKFETLSKNQKILFKNANEKEVIAKSIGIQNLKVFEKYIVSALGEVTKAEFRQREDFKK

SEQ ID NO: 332 - protein, 987 aa, Campylobacter coli
MARILAFDIGISSIGWAFSENDELKDCGVRIFTKAENPKTGESLALPRRLARSARKRLARRKARLNHLKHLIANEFKLNYEDYQSFDESLAKAYKGSLISPYELRFRALNELLSKQDFARVILHIAKRRGYDDIKNSDDKEKGAILKAIKQNEEKLANYQSVGEYLYKEYFQKFKENSKEFTNVRNKKESYERCIAQSFLKDELKLIFKKQREFGFSFSKKFEEEVLSVAFYKRALKDFSHLVGNCSFFTDEKRAPKNSPLAFMFVALTRIINLLNNLKNTEGILYTKDDLNALLNEVLKNGTLTYKQTKKLLGLSDDYEFKGEKGTYFIEFKKYKEFIKALGDHSLSQDDLNEIAKDITLIKDEIKLKKALAKYDLNQNQIDSLSKLEFKDHLNISFKALKLITPLMLEGKKYDEACNELNLKVAINEDKKDFLPAFNETYYKDEVTNPVVLRAIKEYRKVLNALLKKYGKVHKINIELAREVGKNYSQRAKIEKEQNENYKAKKDAELECEKLGLKINSKNILKLRLFKEQKEFCAYSGEKIKISDLQDEKMLEIDHIYPYSRSFDDSYMNKVLVFTKQNQEKLNKTPFEAFGNDSTKWQKIEVLAKNLPEKKQKRILDKNYKDKEQKDFKDRNLNDTRYIARLVLNYTKDYLDFLPLSDDENTKLNDTQKGSKVHVEAKSGMLTSALRHTWGFSTKDRNNHLHHAIDAVIIAYANNSIVKAFSDFKKEQESNSAELYAKKISELDYKNKRKFFEPFSGFRQKVLDKIDEIFVSKPERKKPSGALHEETFRKEEEFYQSYGGKEGVLKALELGKIRKVNGKIVKNGDMFRVDIFKHKKTNKFYAVPIYTMDFALKVLPNKAVARSKKGEIKDWILMDENYEFCFSLYKDSLILIQTKDMQEPEFVYYNAFTSSTVSLIVSKHDNKFETLSKNQKILFKNANEKEVIAKSIGIQNLKVFEKYIVSALGEVTKAEFRQREDFKNELR

SEQ ID NO: 333 - protein, 984 aa, Campylobacter coli
MARILAFDIGISSIGWAFSENDELKDCGVRIFTKAENPKTGESLALPRRLARSARKRLARRKARLNHLKHLIANEFKLNYEDYQSFDESLAKAYKGSLISPYELRFRALNELLSKQDFARVILHIAKRRGYDDIKNSDDKEKGAILKAIKQNEEKLTNYQSVGEYLYKEYFQKFKENSKEFTNVRNKKESYERCIAQSFLKDELKLIFKKQREFGFSFSKKFEEEVLSVAFYKRALKDFSHLVGNCSFFTDEKRAPKNSPLAFMFVALTRIINLLNNLKNTEGILYTKDDLNALLNEVLKNGTLTYKQTKKLLGLSDDYEFKGEKGTYFIEFKKYKEFIKALGDHSLSQDDLNEIAKDITLIKDEIKLKKALAKYDLNQNQIDSLSKLEFKDHLNISFKALKLITPLMLEGKKYDEACNELNLKVAINEDKKDFLPAFNETYYKDEVTNPVVLRAIKEYRKVLNALLKKYGKVHKINIELAREVGKNYSQRAKIEKEQNENYKAKKDAELECEKLGLKINSKNILKLRLFKEQKEFCAYSGEKIKISDLQDEKMLEIDHIYPYSRSFDDSYMNKVLVFTKQNQEKLNQTPFEAFGNDSAKWQKIEVLAKNLPTKKQKRILDKNYKDKEQKDFKDRNLNDTRYIARLVLNYTKDYLDFLPLSDDENTKLNDTQKGSKVHVEAKSGMLTSALRHTWGFSAKDRNNHLHHAIDAVIIAYANNSIVKAFSDFKKEQESNSAELYAKKISELDYKNKRKFFEPFSGFRQKVLDKIDEIFVSKPERKKPSGALHEETFRKEEEFYQSYGGKEGVLKALELGKIRKVNGKIVKNGDMFRVDIFKHKKTNKFYAVPIYTMDFALKVLPNKAVARSKKGEIKDWILMDENYEFCFSLYKDSLILIQTKDMQEPEFVYYNAFTSSTVSLIVSKHDNKFETLSKNQKILFKNANEKEVIAKSIGIQNLKVFEKYIVSALGEVTKAEFRQREDFKK

SEQ ID NO: 334 - protein, 965 aa, Campylobacter coli
MKIIGFNLGIANIGWALRENDEIIDCGVRVFDIPENPKNGNSLALERRENKARMKIVKRKKARMLATKTFLKKELNVDLSKLFLIGSTQSIYELRTKALSSLISKEELSAIILHIAKHRGYDDSALKNENGTIIEALNKNKEAMLKFKSVGEYFYKNFVQNKEVKKIRNTTEDYSNSVPRSLLKQELDLILDKQKELGLIKNADFKAKLFEIIFFKRPLKDFSNKIGNCIFFENEKRAAKNTISACEFVALGKVVNLLKSIEKDIGIVYEKDSINEIMSIILDKTSISYKKIRDILNLPQDINFKGLDYSKNNVENSKLVDLKKLNEFKKALGDGFTNLDKDILDSIATDITLTKDTATLKEKLKNYNVLNAEQIEKLSELVFNDHINLSLKALKQIIPLMYEGKRYDEACELCNFTIAKNQEKNEYLPLFEKTRFAKDISSPVVIRAICEFRKLLNDIIRRYGSVHKIHLELTRDFGISFNDRKKIIKEIEQNEQSRIKALETIKELKLEETSKNIQIVRLFEDQKGICPYSGLKMDLKCLDELVIDYIRPYNRSLDDSYSNKVLTFKKLNDLKQGKTPFEAFGEDEKLWAEINERIKEYNGKKRFKIFDKFFKDKKPFDFTEQTLQDTRWLTKLVASYLNEYLSFLPISEDENTALGYGEKGSKQHVILSSGMITQMLRNFWYLGFKNHKDYKNNAMDAIIVAFTTNSIIFTFNNFKKELDLAKAEFYANKISESDYLLKRKFLPPFSGFKEQALEKVKNIFVSHSLKIKNKGTLHELTPLKIKELKNTYGDLDLAVKLGKIRKYNDKYYANAKGSLVRTDLFADKENKFHAVSIYKADFSTKKLPNKTPATTSNGETKEGIEMNENYNFCMSLYKNTPISVKIKGMKEPIICYYHGFNTSGSKITYKKHDNNYHNLSEDEMVVFRKNDKESIVVGKILEIKKYSISPSGELSLIENEERKWF

SEQ ID NO: 335 - protein, 965 aa, Campylobacter coli
MKIIGFNLGIANIGWALRENDEIIDCGVRVFDIPENPKNGNSLALERRENKARMKIVKRKKARMLATKTFLKKELNVDLSKLFLIGSTQSIYELRTKALSSLISKEELSAIILHIAKHRGYDDSALKNENGTIIEALNKNKEAMLKFKSVGEYFYKNFVQNKEVKKIRNTTEDYSNSVPRSLLKQELDLILDKQKELGLIKNADFKAKLFEIIFFKRPLKDFSNKIGNCIFFENEKRAAKNTISACEFVALGKVVNLLKSIEKDIGIVYEKDSINEIMSIILDKTSISYKKIRDILNLPQDINFKGLDYSKNNAENSKLVDLKKLNEFKKALGDGFANLDKDILDSIATDITLTKDTATLKEKLKNYNVLNAEQIEKLSELVFNDHINLSLKALKQIIPLMYEGKRYDEACELCNFTIAKNQEKNEYLPLFEKTRFAKDISSPVVIRAICEFRKLLNDIIRRYGSVHKIHLELTRDFGISFNDRKKIIKEIEQNEQSRIKALETIKELKLEETSKNIQIVRLFEDQKGICPYSGLKMDLKCLDELVIDYIRPYNRSLDDSYSNKVLTFKKLNDLKQGKTPFEAFGEDEKLWAEINERIKEYNGKKRFKIFDKFFKDKKPFDFTEQTLQDTRWLTKLVASYLNEYLSFLPISEDENTALGYGEKGSKQHVVLSSGMITQMLRNFWYLGFKNHKNYKNNAMDAIIVAFTTNSIIFAFNNFKKELDLAKAEFYANKISESDYLLKRKFLPPFSGFKEQALEKVKNIFVSHSLKIKNKGTLHELTPLKIKELKNTYGDLDLAVKLGKIRKYNDKYYANTKGSLVRTDLFVDKENKFHAVSIYKADFSTKKLPNKTPATTSNGETKEGIEMNENYNFCMSLYKNTPVSVKIKGMKEPIICYYHGFNTSGSKITYKKHDNNYHNLSEDEMVVFRKNDKESIVVGKILEIKKYSISPSGELSLIENEKRKWF

SEQ ID NO: 336 - protein, 965 aa, Campylobacter coli
MKIIGFNLGIANIGWALRENDEIIDCGVRVFDIPENPKNGNSLALERRENKARMKIVKRKKARMLATKTFLKKELNVDLSKLFLIGSTQSIYELRTKALSSLISKEELSAIILHIAKHRGYDDSALKNENGTIIEALNKNKEAMLKFKSVGEYFYKNFVQNKEVKKIRNTTEDYSNSVPRSLLKQELDLILDKQKELGLIKNADFKEKLFEIIFFKRPLKDFSNKIGNCIFFENEKRAAKNTISACEFVALGKVVNLLKSIEKDIGIVYEKDSINEIMSIILDKTSISYKKIRDILNLPQDINFKGLDYSKNNAENSKLVDLKKLNEFKKALGDGFANLDKDILDSIATDITLTKDTATLKEKLKNYNVLNAEQIEKLSELVFNDHINLSLKALKQIIPLMYEGKRYDEACELCNFTIAKNQEKNEYLPLFEKTRFAKDISSPVVIRAICEFRKLLNDIIRRYGSVHKIHLELTRDFGISFNDRKKIIKEIEQNEQSRIKALETIKELKLEETSKNIQIVRLFEDQKGICPYSGLKMDLKCLDELVIDYIRPYNRSLDDSYSNKILTFKKLNDLKQGKTPFEAFGEDEKLWAEINERIKEYNGKKRFKIFDKFFKDKKPFDFTEQTLQDTRWLTKLVASYLNEYLLFLPINEDENTALGYGEKGSKQHVVLSSGMITQMLRNFWYLGFKNHKDYKNNAMDAIIVAFTTNSIIFAFNNFKKELDLAKAEFYANKISESDYLLKRKFLPPFSGFKEQALEKVKNIFVSHSLKIKNKGTLHELTPLKIKELKNTYGDLDLAVKLGKIRKYNDKYYANAKGSLVRTDLFADKENKFHAVSIYKADFSTKKLPNKTPATTSNGETKEGIEMNENYNFCMSLYKNTPISVKIKGMKEPIICYYHGFNTSGSKITYKKHDNNYHNLSEDEMVVFRKNDKESIVVGKILEIKKYSISPSGELSLIENEERKWF

SEQ ID NO: 337 - protein, 933 aa, Campylobacter coli
MKIIGFNLGIANIGWALRENDEIIDCGVRVFDIPENPKNGNSLALERRENKARMKIVKRKKARMLATKTFLKKELNVDLSKLFLIGSTQSIYELRTKALSSLISKEELSVIILHIAKHRGYDDSALKNENGTIIEALNKNKETMLKFKSVGEYFYKNFVQNKEVKKIRNTTEDYSNSVPRSLLKQELDLILDRQKELGLIKNADFKAKLFEIIFFKRPLKDFSNKIGNCIFFENEKRAAKNTISACEFVALGKVVNLLKSIEKDIGIVYEKDSINEIMSIILDKTSISYKKIRDILNLPQDINFKGLDYSKNNVENSKLVDLKKLNEFKKALGDGFTNLDKDILDSIATDITLTKDTATLKEKLKNYNVLNAEQIEKLSELVFNDHINLSLKALKQIIPLMYEGKRYDEACELCNFTIAKNQEKNEYLPLFEKTRFAKDISSPVVIRAICEFRKLLNDIIRRYGSVHKIHLELTRDFGISFNDRKKIIKEIEQNEQSRIKALETIKELKLEETSKNIQIVRLFEDQKGICPYSGLKMDLKCLDELVIDYIRPYNRSLDDSYSNKVLTFKKLNDLKQGKTPFEAFGEDEKLWAEINERIKEYNGKKRFKIFDKFFKDKKPFDFTEQTLQDTRWLTKLVASYLNEHLSFLPISEDENTALGYGEKGSKQHVILSSGMITQMLRNFWYLGFKNHKDYKNNAMDAIIVAFTTNSIIFTFNNFKKELDLAKAEFYANKISESDYLLKRKFLPPFSGFKEQALEKVKNIFVSHSLKIKNKGTLHELTPLKIKELKNTYGDLDLAVKLGKIRKYNDKYYANANGSLVRSDLFIDKKNKFHAVPIYKADFSTKKLPNKTPATTSNGETKEGIEMNENYNFCMSLYKNTPISVKIKGMKESIICYYHGFNTSGSKITYKKHDNNYHNLSEDEMVVFRKNDKE

SEQ ID NO: 338 - protein, 666 aa, Campylobacter jejuni
KGEKGTYFIEFKKYKEFIKALDEHSLSQDDLNEIAKDITLIKDEIKLKKALAKYDLKENQIDSLSKLEFKDHLNISFKALKLITPLMLEGKKYDEACNELNLKVAINEDKKDFLPAFNETYYKDEVTNPVVLRAIKEYRKILNALLKKYGKVHKINIELAREVGKNHSQRAKIEKEQNENYKAKKDAELECEKLGLKINSKNILKLRLFKEQKEFCVYSGEKIKLSDLQDEKMLEIDHIYPYSRSFDDSYMNKVLVFAKQNQEKLNKTPFEAFGNDSTKWQKIEVLTKNLPTKKQKRILDKNYKDKEQKDFKDRNLNDTRYIARLVLNYTKDYLDFLPLSDDENTKLNDTQKGSKVHVEAKSGMLTSALRHTWGFSTKDRNNHLHHAIDAAIIAYANNSIVKAFSDFKKEQESNSAELYAKKISELDYKNKRKFFEPFSGFRQKVLDKIDEIFVSKPERKKPSGALHEETFRKEEEFYQSYGGKEGVLKALELGKIRKVNGKIVKNGDMFRVDIFKHKKTNKFYAVPIYTMDFALKVLPNKAVARSKKGEIKDWILMDEDYEFCFSLYKDSLILIQTKDMQEPELVYFNAFTSSTVSLIVSKHDNKFETLSKNQKILFKNANEKEVIAKSIGIQNLKVFEKYIVSALGEVTKAEFRQREDFKNELR

SEQ ID NO: 339 - protein, 190 aa, Campylobacter jejuni
MAFDIGISSIGWAFSENDELKDCGVRIFTKVENPKTGESLALPRRLARSARKRLARRKARLNHLKHLIANEFKLNYEDYQSFDESLAKAYKGSLISPYELRFRALNELLSKQDFARVILHIAKRRGYDDIKNSDDKEKGAILKAIKQNEEKLANYQSVGEYLYKEYFQKFKENSKEFTNVRNKKKVMNAA

SEQ ID NO: 340 - protein, 985 aa, Campylobacter jejuni
MAKILAFDIGISSIGWAFVENDELKDCGVRIFTKAENPKTGESLALPRRLARSARKRLARRKARLNHLKHLIANEFKLNYEDYQSFDESLAKAYKGTLISPYELRFKALNELLSKQDLARVILHIAKRRGYDNIKNSDDKEKGAILKAVKENEEKLANYKSVGEYLYKEYFQKFKENSKEFINVRNKKESYERCIAQSFLKDELKLIFQKQREFGFNFSKKFEEEVLSVAFYKRALKDFSHLVGNCSFFVDEKRAPKNSPLAFEFVALTRIVNLLNNLNKNNSYIKDDLNALLSEVLKNGTLTYKQTKKILGLSDDYEFKGQKGNYFIEFKKYKEFIKALCEHNLNQDDLNEIAKDITLVKDETKLKKALAKYDLNQNQIENLSKIEFKDHLNISFKALKLIVPLMREGKKYDEVCNELNLKTAINEDKKEFLPAFNETYYKDEVNNPVVLRAIKEYRKVLNSLLKKYGKVHKINIELAREVGKNHRERSKIEKEQNENFKAKKDAELECEKLGLKINSKNILKLRLFKEQKEFCVYSGEKIKISDLQDEKMLEIDHIYPYSRSFDDSYMNKVLVFTKQNQEKLNKTPFEAFGKDDVKWQKIETLAKNLPAKKQKRILDKNYKDKEQKDFKDRNLNDTRYIARLVLNYTKDYLEFLPLSDDENIKLNDTQKGSKVHVEAKSGMLTSVLRHTWGFSTKDRNNHLHHAIDAVIIAYANASVVKAFSDFKKEQENYTAELYAKKINELDFKNKRKFFEPFSNFRQKVLEKIDEIFVSKPERKKPSGALHEETFYKEEEFYKEYGGKEGVLKALELGKIRKVNGKIVSNANMFRVDIFKYKKTNKFYAVPIYTMDFALGILPNKAVVGGKDKQGIIKDWLLMDENYEFCFSLYKDSLILLQTKDMQEPELVYFKSFKSSTAGLVVSKHDNKFENLNENQKKLFKSANEKKVVAEGIGIQNLKVFEKYIVSALGEITKAEIKERENFKKK

SEQ ID NO: 341 - protein, 987 aa, Campylobacter jejuni
MARILAFDIGISSIGWAFSENDELKDCGVRIFTKAENPKTGESLALPRCLARSARKRLARRKARLNHLKHLIANEFKLNYEDYQSFDESLAKAYKGSLISPYELRFRALNELLSKQDFARVILHIAKRRGYDDIKNNGDEEKGEILKAIKQNEEKLVSYQSVGEYLYKEYFQKFKENSKEFINVRNKKESYERCIAQSFLKDELKLIFQKQRKFGFSFSKKFEEEVLSVAFYKRALKDFSHLVGNCSFFTDEKRAPKNSPLAFMFVALTRIINLLNNLKNTEGILYTKDDLNTLLNEVLKNGTLTYKQTKKLLGLSNDYEFKGEKGTYFIEFQKYKEFVKALGEHNLSQDDLNEIAKDITLIKDEIKLKKALAKYDLNQNQIDSLSKLEFKDHLNISFKALKLITPLMLEGKKYDEACNELNLKVAINEDKKDFLPAFNETYYKDEVTNPVVLRAIKEYRKVLNALLKKYGKVHKINIELAREVGKNHSQRAKIEKEQNENYKAKKDAELECEKLGLKINSKNILKLRLFKEQKEFCVYSGEKIKISDLQDEKMLEIDHIYPYSRSFDDSYMNKVLVFTKQNQEKLNKTPFETFGNDRVKWQKIEVLAKNLPTKKQKRILDKNYKDKEQKDFKDRNLNDTRYIARLVLNYTKDYLDFLPLSDDENTKLNDTQKGSKVHVEAKSGMLTSTLRHTWGFSTKDRNNHLHHAIDAAIIAYANNSIVKAFSDFKKEQESNTAELYAKKISELDYKNKRKFFEPFSGFRQKLLDKIDEIFVSKPERKKPSGALHEETFRKEEEFYQSYGGKEGVLKALELGKIRKVNGKIVSNGDMFRVDIFKHKKTNKFYAVPIYTMDFALKVLPNKAVVQGKDKKSGLIKDWILMDENYEFCFSLYKDSLILIQTKDMQEPELVYYERLDSSNASLTVSKHDNKFETLSKNQKILFKNANEKEVIAKSIGIQNLKVFEKYIVSALGEVTKAEFRQREDFKK

SEQ ID NO: 342 - protein, 987 aa, Campylobacter jejuni
MARILAFDIGISSIGWAFSENDELKDCGVRIFTKAENPKTGESLALPRRLARSARKRLARRKARLNHLKHLIANEFKLNYEDYQSFDEGLAKAYKGSLISPYELRFRALNELLSKQDFARVILHIAKRRGYDDIKNNGDEEKSEILKAIKQNEEKLVNYQSVGEYLYKEYFQKFKENSKEFINVRNKKESYERCIAQSFLKDELKLIFQKQREFGFSFSKKFEEEVLSVAFYKRALKDFSHLVGNCSFFTDEKRAPKNSPLAFMFVALTRIINLLNNLKNTEGILYTKDDLNTLLNEVLKNGTLTYKQTKKLLGLSDDYEFKGEKGTYFIEFKKYKEFIKALGEHNLSQDNLNEIAKDITLIKDEIKLKKALAKYDLNQNQIDSLSKLEFKDHLNISFKALKLITPLMLEGKKYDEAYNELNLKVAINEDKKDFLPAFNETYYKDEVTNPVVLRAIKEYRKVLNALLKKYGKVHKINIELAREVGKNHSQRAKIEKEQNENYKAKKDAELECEKLGLKINSKNILKLRLFKEQKEFCAYSGEKIKISDLQDEKMLEIDHIYPYSRSFDDSYMNKVLVFTKQNQEKLNQTPFEAFGNDSAKWQKIEVLAKNLPTKKQKRILDKNYKDKEQKDFKDRNLNDTRYIARLVLNYTKDYLDFLPLSDDENTKLNDTQKGSKVHVEAKSGMLTSALRHTWGFSAKDRNNHLHHAIDAVIIAYANNSIVKAFSDFKKEQESNSAELYAKKISELDYKNKRKFFEPFSGFRQKVLDKIDEIFVSKPERKKPSGALHEETFRKEEEFYQSYGGKEGVLKALELGKIRKVNGKIVKNGDMFRVDIFKHKKTNKFYAVPIYTMDFALKVLPNKAVVQGKDKKSGLIKDWILMDENYEFCFSLYKDSLILIQTKDMQEPELVYFNAFTSSTVSLIVSKHDNKFETLSKNQKILFKNANEKEVIAKSIGIQNLKVFEKYIVSALGEVTKAEFRQREDFKK

SEQ ID NO: 343 - protein, 961 aa, Campylobacter jejuni
MARILAFDIGISSIGWAFSENDELKDCGVRIFTKAENPKTGESLALPRRLARSARKRLARRKARLNHLKHLIANEFKLNYEDYQSFDESLAKAYKGSLISPYELRFRALNELLSKQDFARVILHIAKRRGYDDIKNNGDEEKGKILKAIKQNEEKLVNYQSVGEYLYKEYFQKFKENSKEFINVRNKKESYERCITQSFLKYELKLIFQKQREFGFSFSKKFEEEVLSVAFYKRALKDFSHLVGNCSFFSDEKRAPKNSPLAFMFVALTRIINLLNNLKNTEGILYTKDDLNALLNEVLKNGTLTYKQTKKLLGLSDDYEFKGEKGTYFIEFKKYKEFIKALGEHNLSQDDLNEIAKDITLIKDEIKLKKALAKYDLNQNQIDSLSKLEFKDHLNIGFKALKLITPLMLEGKKYDEACNELNLKVAINEDKKDFLPAFNETYYKDEVTNPVVLRAIKEYRKVLNALLKKYGKVHKINIELAREVGKNHSQRAKIEKEQNENYKAKKDAELECEKLGLKINSKNILKLRLFKEQKEFCAYSGEKIKLSDLQDEKMLEIDHIYPYSRSFDDSYMNKVLVFTKQNQEKLNKTPFEAFGNDNVKWQKIEVLAKNLPEKKQKRILDKNYKDKEQKDFKDRNLNDTRYIARLVLNYTKDYLDFLPLSDDENTKLKGSKVHVEAKSGMLTSALRHTWGFSTKDRNNHLHHAIDAAIIAYANNSIVKDFSDFKKEQESNSAELYAKKISELDYKNKRKFFEPFSGFRQKVLDKIDEIFVSKPERKKPSGALHEETFRKEEEFYQSYGGKEGVLKALELGKIRKVNGKIVKNGDMFRVDIFKHKKTNKFYAVPIYTMDFALKVLPNKAVARSKKGEIKDWILMDENYEFCFSLYKDSLILIQTKDMQEPELVYFNAFTSSTVSLIVSKHDNKFETLSKNLKVFEKYIVSALGEVTKAEFRQREDFKNELR

SEQ ID NO: 344 - protein, 984 aa, Campylobacter jejuni
MARILAFDIGISSIGWAFSENDELKDCGVRIFTKAENPKTGESLALPRRLARSARKRLARRKARLNHLKHLIANEFKLNYEDYQSFDESLAKAYKGSLISPYELRFRALNELLSKQDFARVILHIAKRRGYDDIKNNGDEEKGKILKAIKQNEEKLVNYQSVGEYLYKEYFQKFKENSKEFINVRNKKESYERCITQSFLKYELKLIFQKQREFGFSFSKKFEEEVLSVAFYKRALKDFSHLVGNCSFFTDEKRAPKNSPLAFMFVALTRIINILNNLKNTEGILYTKDDLNALLNEVLKNGTLTYKQTKKLLGLSDDYEFKGEKGTYFIEFKKYKEFIKALGEHNLSQDDLNEIAKDITLIKDEIKLKKALAKYDLNQNQIDSLSKLEFKDHLNISFKALKLITPLMLEGKKYDEACNELNLKVAINEDKKDFLPAFNETYYKDEVTNPVVLRAIKEYRKILNALLKKYGKVHKINIELAREVGKNHSQRAKIEKEQNENYKAKKDAEIECEKLGLKINSKNILKLRLFKEQKEFCAYSGEKIKISDLQDEKMLEIDHIYPYSRSFDDSYMNKVLVFTKQNQEKLNQTPFEAFGNDSAKWQKIEVLAKNLPTKKQKRILDKNYKDKEQKDFKDRNLNDTRYIARLVLNYTKDYLDFLPLSDDENTKLNDTQKGSKVHVEAKSGMLTSALRHTWGFSAKDRNNHLHHAIDAVIIAYANNSIVKAFSDFKKEQESNSAELYAKKISELDYKNKRKFFEPFSGFRQKVLDKIDEIFVSKPERKKPSGALHEETFRKEEEFYQSYGGKEGVLKALELGKIRKVNGKIVKNGDMFRVDIFKHKKTNKFYAVPIYTMDFALKVLPNKAVARSKKGEIKDWILMDENYEFCFSLYKDSLILIQTKDMQEPEFVYYNAFTSSTVSLIVSKHDNKFETLSKNQKILFKNANEKEVIAKSIGIQNLKVFEKYIVSALGEVTKAEFRQREDFKK

SEQ ID NO: 345 - protein, 987 aa, Campylobacter jejuni
MARILAFDIGISSIGWAFSENDELKDCGVRIFTKAENPKTGESLALPRRLARSARKRLARRKARLNHLKHLIANEFKLNYEDYQSFDESLAKAYKGSLISPYELRFRALNELLSKQDFARVILHIAKRRGYDDIKNNGDEEKGKILKAIKQNEEKLVSYQSVGEYLYKEYFQKFKENSKEFINVRNKKESYERCIAQSFLKDELKLIFQKQREFGFSFSKKFEEEVLSVAFYKRALKDFSHLVGNCSFLLMKKERQKNSPLAFMFVALTRIINLLNNLKNTEGILYTKDDLNTLLNEALKNGTLTYKQTKKLLGLSNDYEFKGEKGTYFIEFQKYKEFVKALGEHNLSQDDLNEIAKDITLIKDEIKLKKALAKYDLNQNQIDSLSKLEFKDHLNISFKALKLITPLMLEGKKYDEACNELNLKVAINEDKKDFLPAFNETYYKDEVTNPVVLRAIKEYRKVLNALLKKYGKVHKINIELAREVGKNHSQRAKIEKEQNENYKAKKDAELECEKLGLKINSKNILKLRLFKEQKEFCVYSGEKIKISDLQDEKMLEIDHIYPYSRSFDDSYMNKVLVFTKQNQEKLNKTPFETFGNDRVKWQKIEVLAKNLPTKKQKRILDKNYKDKEQKDFKDRNLNDTRYIARLVLNYTKDYLDFLPLSDDENTKLNDTQKGSKVHVEAKSGMLTSTLRHTWGFSTKDRNNHLHHAIDAAIIAYANNSIVKAFSDFKKEQESNTAELYAKKISELDYKNKRKFFEPFSGFRQKLLDKIDEIFVSKPERKKPSGALHEETFRKEEEFYQSYGGKEGVLKALELGKIRKVNGKMVKNGDMFRVDIFKHKKTNKFYAVPIYTMDFALKVLPNKAVVQGKDKKSGLIKDWILMDENYEFCFSLYKDSLILIQTKDMQEPELVYYERLDSSNASLTVSKHDNKFETLSKNQKILFKNANEKEVIAKSIGIQNLKVFEKYIVSALGEVTKAEFRQREDFKK

SEQ ID NO: 346 - protein, 987 aa, Campylobacter jejuni
MARILAFDIGISSIGWAFSENDELKDCGVRIFTKAENPKTGESLALPRRLARSARKRLARRKARLNHLKHLIANEFKLNYEDYQSFDESLAKAYKGSLISPYELRFRALNELLSKQDFARVILHIAKRRGYDDIKNNGDEEKSEILKAIKQNEEKLVNYQSVGEYLYKEYFQKFKENSKEFINVRNKKESYERCIAQSFLKDELKLIFQKQREFGFSFSKKFEEEVLSVAFYKRALKDFSHLVGNCSFFTDEKRAPKNSPLAFMFVALTRIINLLNNLKNTEGILYTKDDLNTLLNEVLKNGTLTYKQTKKLLGLSDDYEFKGEKGTYFIEFKKYKEFIKALGEHNLSQDNLNEIAKDITLIKDEIKLKKALAKYDLNQNQIDSLSKLEFKDHLNISFKALKLITPLMLEGKKYDEAYNELNLKVAINEDKKDFLPAFNETYYKDEVTNPVVLRAIKEYRKVLNALLKKYGKVHKINIELAREVGKNHSQRAKIEKEQNENYKAKKDAELECEKLGLKINSKNILKLRLFKEQKEFCAYSGEKIKISDLQDEKMLEIDHIYPYSRSFDDSYMNKVLVFTKQNQEKLNQTPFEAFGNDSAKWQKIEVLAKNLPTKKQKRILDKNYKDKEQKDFKDRNLNDTRYIARLVLNYTKDYLDFLPLSDDENTKLNDTQKGSKVHVEAKSGMLTSALRHTWGFSAKDRNNHLHHAIDAVIIAYANNSIVKAFSDFKKEQESNSAELYAKKISELDYKNKRKFFEPFSGFRQKVLDKIDEIFVSKPERKKPSGALHEETFRKEEEFYQSYGGKEGVLKALELGKIRKVNGKIVKNGDMFRVDIFKHKKTNKFYPVPIYTMDFALKVLPNKAVVQGKDKKSGLIKDWILMDENYEFCFSLYKDSLILIQTKDMQEPELVYFNAFTSSTVSLIVSKHDNKFETLSKNQKILFKNANEKEVIAKSIGIQNLKVFEKYIVSALGEVTKAEFRQREDFKK

SEQ ID NO: 347 - protein, 987 aa, Campylobacter jejuni
MARILAFDIGISSIGWAFSENDELKDCGVRIFTKAENPKTGESLALPRRLARSARKRLARRKARLNHLKHLIANEFKLNYEDYQSFDESLAKAYKGSLISPYELRFRALNELLSKQDFARVILHIAKRRGYDDIKNNGDEEKSEILKAIKQNEEKLVNYQSVGEYLYKEYFQKFKENSKEFINVRNKKESYERCIAQSFLKDELKLIFQKQREFGFSFSKKFEEEVLSVAFYKRALKDFSHLVGNCSFFTDEKRAPKNSPLAFMFVALTRIINLLNNLKNTEGILYTKDDLNTLLNEVLKNGTLTYKQTKKLLGLSDDYEFKGEKGTYFIEFKKYKEFIKALGEHNLSQDNLNEIAKDITLIKDEIKLKKALAKYDLNQNQIDSLSKLEFKDHLNISFKALKLITPLMLEGKKYDEAYNELNLKVAINEDKKDFLPAFNETYYKDEVTNPVVLRAIKEYRKVLNALLKKYGKVHKINIELAREVGKNHSQRAKIEKEQNENYKAKKDAELECEKLGLKINSKNILKLRLFKEQKEFCAYSGEKIKISDLQDEKMLEIDHIYPYSRSFDDSYMNKVLVFTKQNQEKLNQTPFEAFGNDSAKWQKIEVLAKNLPTKKQKRILDKNYKDKEQKDFKDRNLNDTRYIARLVLNYTKDYLDFLPLSDDENTKLNDTQKGSKVHVEAKSGMLTSALRHTWGFSAKDRNNHLHHAIDAVIIAYANNSIVKAFSDFKKEQESNSAELYAKKISELDYKNKRKFFEPFSGFRQKVLDKIDEIFVSKPERKKPSGALHEETFRKEEEFHQSYGGKEGVLKALELGKIRKVNGKIVKNGDMFRVDIFKHKKTNKFYAVPIYTMDFALKVLPNKAVVQGKDKKSGLIKDWILMDENYEFCFSLYKDSLILIQTKDMQEPELVYFNAFTSSTVSLIVSKHDNKFETLSKNQKILFKNANEKEVIAKSIGIQNLKVFEKYIVSALGEVTKAEFRQREDFKK

SEQ ID NO: 348 - protein, 987 aa, Campylobacter jejuni
MARILAFDIGISSIGWAFSENDELKDCGVRIFTKAENPKTGESLALPRRLARSARKRLARRKARLNHLKHLIANEFKLNYEDYQSFDESLAKAYKGSLISPYELRFRALNELLSKQDFARVILHIAKRRGYDDIKNNGDEEKSEILKAIKQNEEKLVNYQSVGEYLYKEYFQKFKENSKEFINVRNKKESYERCIAQSFLKDELKLIFQKQREFGFSFSKKFEEEVLSVAFYKRALKDFSHLVGNCSFFTDEKRAPKNSPLAFMFVALTRIINLLNNLKNTEGILYTKDDLNTLLNEVLKNGTLTYKQTKKLLGLSDDYEFKGEKGTYFIEFKKYKEFIKALGEHNLSQDNLNEIAKDITLIKDEIKLKKALAKYDLNQNQIDSLSKLEFKDHLNISFKALKLITPLMLEGKKYDEAYNELNLKVAINEDKKDFLPAFNETYYKDEVTNPVVLRAIKEYRKVLNALLKKYGKVHKINIELAREVGKNHSQRAKIEKEQNENYKAKKDAELECEKLGLKINSKNILKLRLFKEQKEFCAYSGEKIKISDLQDEKMLEIDHIYPYSRSFDDSYMNKVLVFTKQNQEKLNQTPFEAFGNDSAKWQKIEVLAKNLPTKKQKRILDKNYKDKEQKDFKDRNLNDTRYIARLVLNYTKDYLDFLPLSDDENTKLNDTQKGSKVHVEAKSGMLTSALRHTWGFSAKDRNNHLHHAIDAVIIAYANNSIVKAFSDFKKEQESNSAELYAKKISELDYKNKRKFFEPFSGFRQKVLDKIDEIFVSKPERKKPSGALHEETFRKEEEFYQSYGGKEGVLKALELGKIRKVNGKIVKNGDMFRVDIFKHKKTNKFYAVPIYTMDFALKVLPNKAVVQGKDKKSGLIKDWILMDENYEFCFSLYKDSLILIQTKDMQEPELVYFNAFTSSTVSLIVSKHDNKFETLSKNQKILFKNANEKEVIAKSIGIQNLKVFEKYIVSALGEVTKAEFRQREDFKK

SEQ ID NO: 349 - protein, 861 aa, Campylobacter jejuni
MARILAFDIGISSIGWAFSENDELKDCGVRIFTKAENPKTGESLALPRRLARSARKRLARRKARLNHLKHLIANEFKLNYEDYQSFDESLAKAYKGSLISPYELRFRALNELLSKQDFARVILHIAKRRGYDDIKNNGDEEKSEILKAIKQNEEKLVNYQSVGEYLYKEYFQKFKENSKEFINVRNKKESYERCITQSFLKDELKLIFQKQREFGFSFSKKFEEEVLSVAFYKRALKDFSHLVGNCSFFTDEKRAPKNSPLAFMFVALTRIINILNNLKNTEGILYTKDDLNALLNEVLKNGTLTYKQTKKLLGLSDDYEFKGEKGTYFIEFKKYKEFIKALGEHNLSQDDLNEIAKDITLIKDEIKLKKALAKYDLNQNQIDSLSKLEFKDHLNISFKALKLITPLMLEGKKYDEACNELNLKVAINEDKKDFLPAFNETYYKDEVTNPVVLRAIKEYRKILNALLKKYGKVHKINIELAREVGKNHSQRAKIEKEQNENYKAKKDAEIECEKLGLKINSKNILKLRLFKEQKEFCAYSGEKIKLSDLQDEKMLEIDHIYPYSRSFDDSYMNKVLVFTKQNQEKLNKTPFEAFGNDSTKWQKIEVLAKNLPEKKQKRILDKNYKDKEQKDFKDRNLNDTRYIARLVLNYTKDYLDFLPLSDDENTKLNDTQKGSKVHVEAKSGMLTSALRHTWGFSAKDRNNHLHHAIDAAIIAYANNSIVKAFSDFKKEQESNSVELYAKKISELDYKNKRKFFEPFSGFRQKVLDKIDEIFVSKPERKKPSGALHEETFRKEEEFYQSYGGKEGVLKALELGKIRKVNGKIVKNGDMFRVDIFKHKKTNKFLCCANLYYGFCFKSITK

SEQ ID NO: 350 - protein, 462 aa, Campylobacter jejuni
MARILAFDIGISSIGWAFSENDELKDCGVRIFTKAENPKTGESLALPRRLARSARKRLARRKARLNHLKHLIANEFKLNYEDYQSFDESLAKAYKGSLISPYELRFRALNELLSKQDFARVILHIAKRRGYDDIKNNGDEEKSEILKAIKQNEEKLVNYQSVGEYLYKEYFQKFKENSKEFINVRNKKESYERCITQSFLKDELKLIFQKQREFGFSFSKKFEEEVLSVAFYKRALKDFSHLVGNCSFFTDEKRAPKNSPLAFMFVALTRIINILNNLKNTEGILYTKDDLNALLNEVLKNGTLTYKQTKKLLGLSDDYEFKGEKGTYFIEFKKYKEFIKALGEHNLSQDDLNEIAKDITLIKDEIKLKKALAKYDLNQNQIDSLSKLEFKDHLNISFKALKLITPLMLEGKKYDEACNELNLKVAINEDKKDFLPAFNETYYKDEVTNPVVLRAIKEYRKS

SEQ ID NO: 351 - protein, 984 aa, Campylobacter jejuni
MARILAFDIGISSIGWAFSENDELKDCGVRIFTKAENPKTGESLALPRRLARSARKRLARRKARLNHLKHLIANEFKLNYEDYQSFDESLAKAYKGSLISPYELRFRALNELLSKQDFARVILHIAKRRGYDDIKNNGDEEKSEILKAIKQNEEKLVNYQSVGEYLYKEYFQKFKENSKEFINVRNKKESYERCITQSFLKDELKLIFQKQREFGFSFSKKFEEEVLSVAFYKRALKDFSHLVGNCSFFTDEKRAPKNSPLAFMFVALTRIINLLNNLKNTEGILYTKDDLNALLNEVLKNGTLTYKQTKKLLGLSDDYEFKGEKGTYFIEFKKYKEFIKALDEHSLSQDDLNEIAKDITLIKDEIKLKKALAKYDLNQNQIDSLSKLEFKDHLNISFKALKLITPLMLEGKKYDEACNELNLKVAINEDKKDFLPAFNETYYKDEVTNPVVLRAIKEYRKILNALLKKYGKVHKINIELAREVGKNHSQRAKIEKEQNENYKAKKDAEIECEKLGLKINSKNILKLRLFKEQKEFCAYSGEKIKISDLQDEKMLEIDHIYPYSRSFDDSYMNKVLVFTKQNQEKLNKTPFEAFGNDGVKWQKIEVLAKNLPEKKQKRILDKNYKDKEQKDFKDRNLNDTRYIARLVLNYTKDYLDFLPLSDDENTKLNDTQKGSKVHVEAKSGMLTSALRHTWGFSTKDRNNHLHHAIDAAIIAYANNSIVKAFSDFKKEQESNSAELYAKKISELDYKNKRKFFEPFSGFRQKVLDKIDEIFVSKPERKKPSGALHEETFRKEEEFYQSYGGKEGVLKALELGKIRKVNGKIVKNGDMFRVDIFKHKKTNKFYAVPIYTMDFALKVLPNKAVARSKKGEIKDWILMDENYEFCFSLYKDSLILIQTKDMQEPELVYFNAFTSSTVSLVVSKHDNKFETLSKNQKILFKNANEKEVIAKSIGIQNLKVFEKYIVSALGEVTKAEFRQREDFKK

SEQ ID NO: 352 - protein, 984 aa, Campylobacter jejuni
MARILAFDIGISSIGWAFSENDELKDCGVRIFTKAENPKTGESLALPRRLARSARKRLARRKARLNHLKHLIANEFKLNYEDYQSFDESLAKAYKGSLISPYELRFRALNELLSKQDFARVILHIAKRRGYDDIKNSDDKEKGAILKAIKQNEEKLANYQSVGEYLYKEYFQKFKENSKEFTNVRNKKESYERCIAQSFLKDELKLIFKKQREFGFSFSKKFEEEVLSVAFYKRALKDFSHLVGNCSFFTDEKRAPKNSPLAFMFVALTRIINLLNNLKNTEGILYTKDDLNALLNEVLKNGTLTYKQTKKLLGLSDDYEFKGEKGTYFIEFKKYKEFIKALGDHSLSQDDLNEIAKDITLIKDEIKLKKALAKYDLNQNQIDSLSKLEFKDHLNISFKALKLITPLMLEGKKYDEACNELNLKVAINEDKKDFLPAFNETYYKDEVTNPVVLRAIKEYRKVLNALLKKYGKVHKINIELAREVGKNYSQRAKIEKEQNENYKAKKDAELECEKLGLKINSKNILKLRLFKEQKEFCAYSGEKIKISDLQDEKMLEIDHIYPYSRSFDDSYMNKVLVFTKQNQEKLNQTPFEAFGNDSAKWQKIEVLAKNLPTKKQKRILDKNYKDKEQKDFKDRNLNDTRYIARLVLNYTKDYLDFLPLSDDENTKLNDTQKGSKVHVEAKSGMLTSALRHTWGFSAKDRNNHLHHAIDAVIIAYANNSIVKAFSDFKKEQESNSAELYAKKISELDYKNKRKFFEPFSGFRQKVLDKIDEIFVSKPERKKPSGALHEETFRKEEEFYQSYGGKEGVLKALELGKIRKVNGKIVKNGDMFRVDIFKHKKTNKFYAVPIYTMDFALKVLPNKAVARSKKGEIKDWILMDENYEFCFSLYKDSLILIQTKDMQEPEFVYYNAFTSSTVSLIVSKHDNKFETLSKNQKILFKNANEKEVIAKSIGIQNLKVFEKYIVSALGEVTKAEFRQREDFKK

SEQ ID NO: 353 - protein, 984 aa, Campylobacter jejuni
MARILAFDIGISSIGWAFSENDELKDCGVRIFTKAENPKTGESLALPRRLARSARKRLARRKARLNHLKHLIANEFKLNYEDYQSFDESLAKAYKGSLISPYELRFRALNELLSKQDFARVILHIAKRRGYDDIKNSDDKEKGAILKAIKQNEEKLANYQSVGEYLYKEYFQKFKENSKEFTNVRNKKESYERCIAQSFLKDELKLIFKKQREFGFSFSKKFEEEVLSVAFYKRALKDFSHLVGNCSFFTDEKRAPKNSPLAFMFVALTRIINLLNNLKNTEGILYTKDDLNTLLNEVLKNGTLTYKQTKKLLGLSDDYEFKGEKGTYFIEFKKYKEFIKALGEHNLSQDDLNEIAKDITLIKDEIKLKKALAKYDLNQNQIDSLSKLEFKDHLNISFKALKLITPLMLEGKKYDEACNELNLKVAINEDKKDFLPAFNETYYKDEVTNPVVLRAIKEYRKVLNALLKKYGKVHKINIELAREVGKNYSQRAKIEKEQNENYKAKKDAELECEKLGLKINSKNILKLRLFKEQKEFCAYSGEKIKISDLQDEKMLEIDHIYPYSRSFDDSYMNKVLVFTKQNQEKLNKTPFEAFGNDSTKWQKIEVLAKNLPEKKQKRILDKNYKDKEQKDFKDRNLNDTRYIARLVLNYTKDYLDFLPLSDDENTKLNDTQKGLKVHVEAKSGMLTSALRHTWGFSAKDRNNHLHHAIDAVIIAYANNSIVKAFSDFKKEQESNSAELYAKKISELDYKNKRKFFEPFSGFRQKVLDKIDEIFVSKPERKKPSGALHEETFRKEEEFYQSYGGKEGVLKALELGKIRKVNGKIVKNGDMFRVDIFKHKKTNKFYAVPIYTMDFALKVLPNKAVARSKKGEIKDWILMDENYEFCFSLYKDSLILIQTKDMQEPEFVYYNAFTSSTVSLIVSKHDNKFETLSKNQKILFKNANEKEVIAKSIGIQNLKVFEKYIVSALGEVTKAEFRQREDFKK

SEQ ID NO: 354 - protein, 984 aa, Campylobacter jejuni
MARILAFDIGISSIGWAFSENDELKDCGVRIFTKAENPKTGESLALPRRLARSARKRLARRKARLNHLKHLIANEFKLNYEDYQSFDESLAKAYKGSLISPYELRFRALNELLSKQDFARVILHIAKRRGYDDIKNSDDKEKGAILKAIKQNEEKLANYQSVGEYLYKEYFQKFKENSKEFTNVRNKKESYERCIAQSFLKDELKLIFKKQREFGFSFSKKFEEEVLSVAFYKRALKDFSHLVGNCSFFTDEKRAPKNSPLAFMFVALTRIINLLNNLKNTEGILYTKDDLNALLNEVLKNGTLTYKQTKKLLGLSDDYEFKGEKGTYFIEFKKYKEFIKALGDHSLSQDDLNEIAKDITLIKDEIKLKKALAKYDLNQNQIDSLSKLEFKDHLNISFKALKLITPLMLEGKKYDEACNELNLKVAINEDKKDFLPAFNETYYKDEVTNPVVLRAIKEYRKVLNALLKKYGKVHKINIELAREVGKNYSQRAKIEKEQNENYKAKKDAELECEKLGLKINSKNILKLRLFKEQKEFCAYSGEKIKISDLQDEKMLEIDHIYPYSRSFDDSYMNKVLVFTKQNQEKLNQTPFEAFGNDSAKWQKIEVLAKNLPTKKQKRILDKNYKDKEQKNFKDRNLNDTRYIARLVLNYTKDYLDFLPLSDDENTKLNDTQKGSKVHVEAKSGMLTSALRHTWGFSAKDRNNHLHHTIDAVIIAYANNSIVKAFSDFKKEQESNSAELYAKKISELDYKNKRKFFEPFSGFRQKVLDKIDEIFVSKPERKKPSGALHEETFRKEEEFYQSYGGKEGVLKALELGKIRKVNGKIVKNGDMFRVDIFKHKKTNKFYAVPIYTMDFALKVLPNKAVARSKKGEIKDWILMDENYEFCFSLYKDSLILIQTKDMQEPEFVYYNAFTSSTVSLIVSKHDNKFETLSKNQKILFKNANEKEVIAKSIGIQNLKVFEKYIVSALGEVTKAEFRQREDFKK

SEQ ID NO: 355 - protein, 984 aa, Campylobacter jejuni
MARILAFDIGISSIGWAFSENDELKDCGVRIFTKAENPKTGESLALPRRLARSARKRLARRKARLNHLKHLIANEFKLNYEDYQSFDESLAKAYKGSLISPYELRFRALNELLSKQDFARVILHIAKRRGYDDIKNSDDKEKGAILKAIKQNEEKLANYQSVGEYLYKEYFQKFKENSKEFTNVRNKKESYERCIAQSFLKDELKLIFKKQREFGFSFSKKFEEEVLSVAFYKRALKDFSHLVGNCSFFTDEKRAPKNSPLAFMFVALTRIINLLNNLKNTEGILYTKDDLNTFLNEVLKNGTLTYKQTKKLLGLSDDYEFKGEKGTYFIEFKKYKEFIKALGDHNLSQDDLNEIAKDITLIKDEIKLKKALAKYDLNQNQIDSLSKLEFKDHLNISFKALKLITPLMLEGKKYDEACNELNLKVAINEDKKDFLPAFNETYYKDEVTNPVVLRAIKEYRKVLNALLKKYGKVHKINIELAREVGKNHSQRAKIEKEQNENYKAKKDAELECEKLGLKINSKNILKLRLFKEQKEFCAYSGEKIKISDLQDEKMLEIDHIYPYSRSFDDSYMNKVLVFTKQNQEKLNKTPFEAFGNDSAKWQKIEVLAKNLPTKKQKRILDKNYKDKEQKDFKDRNLNDTRYIARLVLNYTKDYLDFLPLSDDENTKLNDTQKGSKVHVEAKSGMLTSALRHTWGFSTKDRNNHLHHAIDAVIIAYANNSIVKAFSDFKKEQESNSAELYAKKISELDYKNKRKFFEPFSGFRQKVLDKIDEIFVSKPERKKPSGALHEETFRKEEEFYQSYGGKEGVLKALELGKIRKVNGKIVKNGDMFRVDIFKHKKTNKFYAVPIYTMDFALKVLPNKAVARSKKGEIKDWILMDENYEFCFSLYKDSLILIQTKDMQEPEFVYYNAFTSSTVSLIVSKHDNKFETLSKNQKILFKNANEKEVIAKSIGIQNLKVFEKYIVSALGEVTKAEFRQREDFKK

SEQ ID NO: 356 - protein, 987 aa, Campylobacter jejuni
MARILAFDIGISSIGWAFSENDELKDCGVRIFTKAENPKTGESLALPRRLARSARKRLARRKARLNHLKHLIANEFKLNYEDYQSFDESLAKAYKGSLISPYELRFRALNELLSKQDFARVILHIAKRRGYDDIKNSDDKEKGAILKAIKQNEEKLANYQSVGEYLYKEYFQKFKENSKEFTNVRNKKESYERCIAQSFLKDELKLIFKKQREFGFSFSKKFEEEVLSVAFYKRALKDFSHLVGNCSFFTDEKRAPKNSPLAFMFVALTRIINLLNNLKNTEGILYTKDDLNTLLNEVLKNGTLTYKQTKKLLGLSDDYEFKGEKGTYFIEFKKYKEFIKSLGDHSLSQDDLNEIAKDITLIKDEIKLKKALAKYDLNQNQIDSLSKLEFKDHLNISFKALKLITPLMLEGKKYDEACNELNLKVAINEDKKDFLPAFNETYYKDEVTNPVVLRAIKEYRKVLNALLKKYGKVHKINIELAREVGKNHSQRAKIEKEQNENYKAKKDAELECEKLGLKINSKNILKLRLFKEQKEFCAYSGEKIKISDLQDEKMLEIDHIYPYSRSFDDSYMNKVLVFTKQNQEKLNQTPFEAFGNDSAKWQKIEVLAKNLPTKKQKRILDKNYKDKEQKNFKDRNLNDTRYIARLVLNYTKDYLDFLPLSDDENTKLNDTQKGSKVHVEAKSGMLTSALRHTWGFSAKDRNNHLHHAIDAVIIAYANNSIVKAFSDFKKEQESNSAELYAKKISELDYKNKRKFFEPFSGFRQKVLDKIDEIFVSKPERKKPSGALHEETFRKEEEFYQSYGGKEGVLKALELGKIRKVNGKIVKNGDMFRVDIFKHKKTNKFYAVPIYTMDFALKVLPNKAVARSKKGEIKDWILMDENYEFCFSLYKDSLILIQTKDMQEPEFVYYNAFTSSTVSLIVSKHDNKFETLSKNQKILFKNANEKEVIAKSIGIQNLKVFEKYIVSALGEVTKAEFRQREDFKNELR

SEQ ID NO: 357 - protein, 987 aa, Campylobacter jejuni
MARILAFDIGISSIGWAFSENDELKDCGVRIFTKAENPKTGESLALPRRLARSARKRLARRKARLNHLKHLIANEFKLNYEDYQSFDESLAKAYKGSLISPYELRFRALNELLSKQDFARVILHIAKRRGYDDIKNSDDKEKGAILKAIKQNEEKLANYQSVGEYLYKEYFQKFKENSKEFTNVRNKKESYERCIAQSFLKDELKLIFKKQREFGFSFSKKFEEEVLSVAFYKRALKDFSHLVGNCSFFTDEKRAPKNSPLAFMFVALTRIINLLNNLKNTEGILYTKDDLNALLNEVLKNGTLTYKQTKKLLGLSDDYEFKGEKGTYFIEFKKYKEFIKALGDHSLSQDDLNEIAKDITLIKDEIKLKKALVKYDLNQNQIDSLSKLEFKDHLNISFKALKLITPLMLEGKKYDEACNELNLKVAINEDKKDFLPAFNETYYKDEVTNPVVLRAIKEYRKVLNALLKKYGKVHKINIELAREVGKNYSQRAKIEKEQNENYKAKKDAELECEKLGLKINSKNILKLRLFKEQKEFCAYSGEKIKISDLQDEKMLEIDHIYPYSRSFDDSYMNKVLVFTKQNQEKLNQTPFEAFGNDSAKWQKIEVLAKNLPTKKQKRILDKNYKDKEQKDFKDRNLNDTRYIARLVLNYTKDYLDFLPLSDDENTKLNDTQKGSKVHVEAKSGMLTSALRHTWGFSAKDRNNHLHHAIDAVIIAYANNSIVKAFSDFKKEQESNSAELYAKKISELDYKNKRKFFEPFSGFRQKVLDKIDEIFVSKPERKKPSGALHEETFRKEEEFYQSYGGKEGVLKALELGKIRKVNGKIVKNGDMFRVDIFKHKKTNKFYAVPIYTMDFALKVLPNKAVARSKKGEIKDWILMDENYEFCFSLYKDSLILIQTKDMQEPELVYFNAFTSSTVSLIVSKHDNKFETLSKNQKILFKNANEKEVIAKSIGIQNLKVFEKYIVSALGEVTKAEFRQREDFKNELR

SEQ ID NO: 358 - protein, 983 aa, Campylobacter jejuni; identical to SEQ ID NO: 236

SEQ ID NO: 359 - protein, 987 aa, Campylobacter jejuni
MARILAFDIGISSIGWAFSENDELKDCGVRIFTKAENPKTGESLALPRRLARSARKRLARRKARLNHLKHLIANEFKLNYEDYQSFDESLAKAYKGSLISPYELRFRALNELLSKQDFARVILHIAKRRGYDDIKNSDDKEKGAILKAIKQNEEKLVNYQSVGEYLYKEYFQKFKENSKEFTNVRNKKESYERCIAQSFLKDELKLIFKKQREFGFSFSKKFEEEVLSVAFYKRALKDFSHLVGNCSFFTDEKRAPKNSPLAFMFVALTRIINLLNNLKNTEGILYTKDDLNALLNEVLKNGTLTYKQTKKLLGLSDDYEFKGEKGTYFIEFKKYKEFIKALGDHSLSQDDLNEIAKDITLIKDEIKLKKALAKYDLNQNQIDSLSKLEFKDHLNISFKALKLITPLMLEGKKYDEACNELNLKVAINEDKKDFLPAFNETYYKDEVTNPVVLRAIKEYRKVLNALLKKYGKVHKINIELAREVGKNYSQRAKIEKEQNENYKAKKDAELECEKLGLKINSKNILKLRLFKEQKEFCAYSGEKIKISDLQDEKMLEIDHIYPYSRSFDDSYMNKVLVFTKQNQEKLNQTPFEAFGNDSAKWQKIEVLAKNLPTKKQKRILDKNYKDKEQKDFKDRNLNDTRYIARLVLNYTKDYLDFLPLSDDENTKLNDTQKGSKVHVEAKSGMLTSALRHTWGFSAKDRNNHLHHAIDAVIIAYANNSIVKAFSDFKKEQESNSAELYAKKISELDYKNKRKFFEPFSGFRQKVLDKIDEIFVSKPERKKPSGALHEETFRKEEEFYQSYGGKEGVLKALELGKIRKVNGKIVKNGDMFRVDIFKHKKTNKFYAVPIYTMDFALKVLPNKAVARSEKGEIKDWILMDENYEFCFSLYKDSLILIQTKDMQEPELVYFNAFTSSTVSLIVSKHDNKFETLSKNQKILFKNANEKEVIAKSIGIQNLKVFEKYIVSALGEVTKAEFRQREDFKNELR

SEQ ID NO: 360 - protein, 987 aa, Campylobacter jejuni
MARILAFDIGISSIGWAFSENDELKDCGVRIFTKAENPKTGESLALPRRLARSARKRLARRKARLNHLKHLIANEFKLNYEDYQSFDESLAKAYKGSLISPYELRFRALNELLSKQDFARVILHIAKRRGYDNIKNSDNEEKSEILKAIKQNEEKLVNYQSVGEYLYKEYFQKFKENSKEFINVRNKKESYERCIAQSFLKDELKLIFQKQREFGLSFSKKFEEEVLSVAFYKRALKDFSHLVGNCSFFTDEKRAPKNSPLAFMFVALTRIINLLNNLKNTEGILYTKDDLNTLLNEVLKNGTLTYKQTKKLLGLSDDYEFKGEKGTYFIEFKKYKEFIKALGDHSLSQDDLNEIAKDITLIKDEIKLKKALAKYDLNQNQIDSLSKLEFKDHLNISFKALKLITPLMLEGKKYDEACNELNLKVVINEDKKDFLPAFNETYYKDEVTNPVVLRAIKEYRKVLNALLKKYGKVHKINIELAREVGKNHSQRAKIEKEQNENYKAKKDAELECEKLGLKINNKNILKLRLFKEQKEFCAYSGEKIKLSDLQDEKMLEIDHIYPYSRSFDDSYMNKVLVFTKQNQEKLNKTPFEAFGNDSTKWQKIEVLAKNLPTKKQKRILDKNYKDKEQKDFKDRNLNDTRYIARLVLNYTKDYLDFLPLSDDENTKLNDIQKGSKVHVEAKSGMLTSALRHTWGFSTKDRNNHLHHAIDAVIIAYANNSIVKAFSDFKKEQESNSAELYAKKISELDYKNKRKFFEPFSGFRQKVLDKIDEIFVSKPERKKPSGALHEETFRKEEEFYQSYGGKEGVLKALELGKIRKVNGKIVKNGDMFRVDIFKHKKTNKFYAVPIYTMDFALKVLPNKAVVQGKDKKSGLIKDWILMDENYEFCFSLYKDSLILIQTKDMQEPEFVYYNAFTSSTVSLIVSKHDNKFETLSKNQKILFKNANEKEVIAKSIGIQNLKVFEKYIVSALGEVTKAEFRQREDFKK

SEQ ID NO: 361 - protein, 984 aa, Campylobacter jejuni
MARILAFDIGISSIGWAFSENDELKDCGVRIFTKAENPKTGESLALPRRLARSARKRLARRKARLNHLKHLIANEFKLNYEDYQSFDESLAKAYKGSLISPYELRFRALNELLSKQDFARVILHIVKRRGYDDIKNSDDKEKGAILKAIKQNEEKLANYQSVGEYLYKEYFQKFKENSKEFTNVRNKKESYERCIAQSFLKDELKLIFKKQREFGFSFSKKFEEEVLSVAFYKRALKDFSHLVGNCSFFTDEKRAPKNSPLAFMFVALTRIINLLNNLKNTEGILYTKDDLNTLLNEVLKNGTLTYKQTKKLLGLSDDYEFKGEKGTYFIEFKKYKEFIKALGDHSLSQDDLNEIAKDITLIKDEIKLKKALAKYDLNQNQIDSLSKLEFKDHLNISFKALKLITPLMLEGKKYDEACNELNLKVAINEDKKDFLPAFNETYYKDEVTNPVVLRAIKEYRKVLNALLKKYGKVHKINIELAREVGKNHSQRAKIEKEQNENYKAKKDAEFECEKLGLKINSKNILKLRLFKEQKEFCAYSGEKIKISDLQDEKMLEIDHIYPYSRSFDDSYMNKVLVFTKQNQEKLNKTPFEAFGNDSAKWQKIEVLAKNLPTKKQKRILDKNYKDKEQKDFKDRNLNDTRYIARLVLNYTKDYLDFLPLSDDENTKLNDTQKGSKVHVEAKSGMLTSALRHTWGFSTKDRNNHLHHAIDAVIIAYANNSIVKAFSDFKKEQESNSAELYAKKISELDYKNKRKFFEPFSGFRQKVLDKIDEIFVSKPERKKPSGALHEETFRKEEEFYQSYGGKEGVLKALELGKIRKVNGKIVKNGDMFRVDIFKHKKTNKFYAVPIYTMDFALKVLPNKAVARSKKGEIKDWILMDENYEFCFSLYKDSLILIQTKDMQEPEFVYYNAFTSSTVSLIVSKHDNKFETLSKNQKILFKNANEKEVIAKSIGIQNLKVFEKYIVSALGEVTKAEFRQREDFKK

SEQ ID NO: 362 - protein, 984 aa, Campylobacter jejuni
MARILAFDIGISSIGWAFSENDELKDCGVRIFTKAENPKTGESLALPRRLARSARKRLARRKARLNHLKHLIANEFKLNYEDYQSFDESLAKAYKGSLISPYELRFRALNELLSKQDFARVILHIVKRRGYDDIKNSDDKEKGTILKAIKQNEEKLANYQSVGEYLYKEYFQKFKENSKEFTNVRNKKESYERCIAQSFLKDELKLIFKKQREFGFSFSKKFEEEVLSVAFYKRALKDFSHLVGNCSFFTDEKRAPKNSPLAFMFVALTRIINLLNNLKNTEGILYTKDDLNTLLNEVLKNGTLTYKQTKKLLGLSDDYEFKGEKGTYFIEFKKYKEFIKALGEHNLSQDDLNEIAKDITLIKDEIKLKKALAKYDLNQNQIDSLSKLEFKDHLNISFKALKLITPLMLEGKKYDEACNELNLKVAINEDKKDFLPAFNETYYKDEVTNPVVLRAIKEYRKVLNALLKKYGKVHKINIELAREVGKNYSQRAKIEKEQNENYKAKKDAELECEKLGLKINSKNILKLRLFKEQKEFCAYSGEKIKISDLQDEKMLEIDHIYPYSRSFDDSYMNKVLVFTKQNQEKLNQTPFEAFGNDSAKWQKIEVLAKNLPTKKQKRILDKNYKDKEQKDFKDRNLNDTRYIARLVLNYTKDYLDFLPLSDDENTKLNDTQKGSKVHVEAKSGMLTSALRHTWGFSAKDRNNHLHHAIDAVIIAYANNSIVKAFSDFKKEQESNSAELYAKKISELDYKNKRKFFEPFSGFRQKVLDKIDEIFVSKPERKKPSGALHEETFRKEEEFYQSYGGKEGVLKALELGKIRKVNGKIVKNGDMFRVDIFKHKKTNKFYAVPIYTMDFALKVLPNKAVARSKKGEIKDWILMDENYEFCFSLYKDSLILIQTKDMQEPEFVYYNAFTSSTVSLIVSKHDNKFETLSKNQKILFKNANEKEVIAKSIGIQNLKVFEKYIVSALGEVTKAEFRQREDFKK

SEQ ID NO: 363 - protein, 987 aa, Campylobacter jejuni
MARILAFDIGISSIGWAFSENDELKDCGVRIFTKAENPKTGESLALPRRLARSARKRLARRKARLNHLKHLIANEFKLNYEDYQSFNESLAKAYKGSLISPYELRFRALNELLSKQDFARVILHIAKRRGYDDIKNSDDKEKGAILKVIKQNEEKLANYQSVGEYLYKEYFQKFKENSKEFTNVRNKKESYERCIAQSFLKDELKLIFQKQREFGFSFSKKFEEEVLSVAFYKRALKDFSHLVGNCSFFTDEKRAPKNSPLAFMFVALTRIINLLNNLKNTEGILYTKDDLNALLNEVLKNGTLTYKQTKKLLGLSDDYEFKGEKGTYFIEFKKYKEFIKALGDHSLSQDDLNEIAKDITLIKDEIKLKKALAKYDLNQNQIDSLSKLEFKDHLNISFKALKLITPLMLEGKKYDEACNELNLKVAINEDKKDFLPAFNETYYKDEVTNPVVLRAIKEYRKVLNALLKKYGKVHKINIELAREVGKNYSQRAKIEKEQNENYKAKKDAELECEKLGLKINSKNILKLRLFKEQKEFCAYSGEKIKISDLQDEKMLEIDHIYPYSRSFDDSYMNKVLVFTKQNQEKLNQTPFEAFGNDSAKWQKIEVLAKNLPTKKQKRILDKNYKDKEQKDFKDRNLNDTRYIARLVLNYTKDYLDFLPLSDDENTKLNDTQKGSKVHVEAKSGMLTSALRHTWGFSAKDRNNHLHHAIDAVIIAYANNSIVKAFSDFKKEQESNSAELYAKKISELDYKNKRKFFEPFSGFRQKVLDKIDEIFVSKPERKKPSGALHEETFRKEEEFYQSYGGKEGVLKALELGKIRKVNGKIVKNGDMFRVDIFKHKKTNKFYAVPIYTMDFALKVLPNKAVARSKKGEIKDWILMDENYEFCFSLYKDSLILIQTKDMQEPELVYFNAFTSSTVSLIVSKHDNKFETLSKNQKILFKNANEKEVIAKSIGIQNLKVFEKYIVSALGEVTKAEFRQREDFKNELR

SEQ ID NO: 364 - protein, 984 aa, Campylobacter jejuni
MARILAFDIGISSIGWAFSENDELKDCGVRIFTKAENPKTGESLALPRRLARSARKRLARRKARLNRLKHLIANEFKLNYEDYQSFDESLAKAYKGSLISPYELRFRALNELLSKQDFARVILHIAKRRGYDDIKNSDDKEKGAILKAIKQNEEKLANYQSVGEYLYKEYFQKFKENSKEFTNVRNKKESYERCIAQSFLKDELKLIFKKQREFGFSFSKKFEEEVLSVAFYKRALKDFSHLVGNCSFFTDEKRAPKNSPLAFMFVALTRIINLLNNLKNTEGILYTKDDLNALLNEVLKNGTLTYKQTKKLLGLSDDYEFKGEKGTYFIEFKKYKEFIKALGDHSLNQDDLNEIAKDITLIKDEIKLKKALAKYDLNQNQIDSLSKLEFKDHLNISFKALKLITPLMLEGKKYDEACNELNLKVAINEDKKDFLPAFNETYYKDEVTNPVVLRAIKEYRKVLNALLKKYGKVHKINIELAREVGKNYSQRAKIEKEQNENYKAKKDAELECEKLGLKINSKNILKLRLFKEQKEFCVYSGEKIKISDLQDEKMLEIDHIYPYSRSFDDSYMNKVLVFTKQNQEKLNQTPFEAFGNDSAKWQKIEVLAKNLPTKKQKRILDKNYKDKEQKDFKDRNLNDTRYIARLVLNYTKDYLDFLPLSDDENTKLNDTQKGSKVYVEAKSGMLTSALRHTWGFSTKDRNNHLHHAIDAVIIAYANNSIVKAFSDFKKEQESNSAELYAKKISELDYKNKRKFFEPFSGFRQKVLDKIDEIFVSKPERKKPSGALHEETFRKEEEFYQSYGGKEGVLKALELGKIRKVNGKIVKNGDMFRVDIFKHKKTNKFYAVPIYTMDFALKVLPNKAVARSKKGEIKDWILMDENYEFCFSLYKDSLILIQTKDMQEPEFVYYNAFTSSTVSLIVSKHDNKFETLSKNQKILFKNANEKEVIAKSIGIQNLKVFEKYIVSALGEVTKAEFRQREDFKK

SEQ ID NO: 365 - protein, 984 aa, Campylobacter jejuni
MARILAFDIGISSIGWAFSENDELKDCGVRIFTKVENPKTGESLALPRRLARSARKRLARRKARLNHLKHLIANEFKLNYEDYQSFDESLAKAYKGSLISPYELRFRALNELLSKQDFARVILHIAKRRGYDDIKNSDDKEKGAILKAIKQNEEKLANYQSVGEYLYKEYFQKFKENSKEFTNVRNKKESYERCIAQSFLKDELKLIFKKQREFGFSFLKKFEEEVLSVAFYKRALKDFSHLVGNCSFFTDEKRAPKNSPLAFMFVALTRIINLLNNLKNTEGILYTKDDLNALLNEVLKNGTLTYKQTKKLLGLSDDYEFKGEKGTYFIEFKKYKEFIKALGEHNLSQDDLNEIAKDITLIKDEIKLKKALAKYDLNQNQIDSLSKLEFKDHLNISFKALKLITPLMLEGKKYDEAYNELNLKVAINEDKKDFLPAFNETYYKDEVTNPVVLRAIKEYRKVLNALLKKYGKVHKINIELAREVGKNHSQRAKIEKEQNENYKAKKDAELECEKLGLKINSKNILKLRLFKEQKEFCAYSGEKIKISDLQDEKMLEIDHIYPYSRSFDDSYMNKVLVFTKQNQEKLNQTPFEAFGNDSAKWQKIEVLAKNLPTKKQKRILDKNYKDKEQKDFKDRNLNDTRYIARLVLNYTKDYLDFLPLSDDENTKLNDTQKGSKVHVEAKSGMLTSALRHTWGFSAKDRNNHLHHAIDAVIIAYANNSIVKAFSDFKKEQESNSAELYAKKISELDYKNKRKFFEPFSGFRQKVLDKIDEIFVSKPERKKPSGALHEETFRKEEEFYQSYGGKEGVLKALELGKIRKVNGKIVKNGDMFRVDIFKHKKTNKFYAVPIYTMDFALKVLPNKAVARSKKGEIKDWILMDENYEFCFSLYKDSLILIQTKDMQEPELVYFNAFTSSTVSLIVSKHDNKFETLSKNQKILFKNANEKEVIAKSIGIQNLKVFEKYIVSALGEVTKAEFRQREDFKK

SEQ ID NO: 366 - protein, 984 aa, Campylobacter jejuni
MARILAFDIGISSIGWAFSENDELKDCGVRIFTKVENPKTGESLALPRRLARSARKRLARRKARLNHLKHLIANEFKLNYEDYQSFDESLAKAYKGSLISPYELRFRALNELLSKQDFARVILHIAKRRGYDDIKNSDDKEKGAILKAIKQNEEKLANYQSVGEYLYKEYFQKFKENSKEFTNVRNKKESYERCIAQSFLKDELKLIFKKQREFGFSFSKKFEEEVLSVAFYKRALKDFSHLVGNCSFFTDEKRAPKNSPLAFMFVALTRIINLLNNLKNTEGILYTKDDLNALLNEVLKNGTLTYKQTKKLLGLSDDYEFKGEKGTYFIEFKKYKEFIKALGEHNLSQDDLNEIAKDITLIKDEIKLKKALAKYDLNQNQIDSLSKLEFKDHLNISFKALKLITPLMLEGKKYDEACNELNLKVAINEDKKDFLPAFNETYYKDEVTNPVVLRAIKEYRKVLNALLKKYGKVHKINIELAREVGKNHSQRAKIEKEQNENYKAKKDAELECEKLGLKINSKNILKLRLFKEQKEFCAYSGEKIKISDLQDEKMLEIDHIYPYSRSFDDSYMNKVLVFTKQNQEKLNKTPFEAFGNDSAKWQKIEVLAKNLPTKKQKRILDKNYKDKEQKDFKDRNLNDTRYIARLVLNYTKDYLDFLPLSNDENTKLNDTQKGSKVHVEAKSGMLTSALRHTWGFSTKDRNNHLHHAIDAVIIAYANNSIVKAFSDFKKEQESNSAELYAKKISELDYKNKRKFFEPFSGFRQKVLDKIDEIFVSKPERKKPSGALHEETFRKEEEFYQSYGGKEGVLKALELGKIRKVNGKIVKNGDMFRVDIFKHKKTNKFYAVPIYTMDFALKVLPNKAVARSKKGEIKDWILMDENYEFCFSLYKDSLILIQTKDMQEPEFVYYNAFTSSTVSLIVSKHDNKFETLSKNQKILFKNANEKEVIAKSIGIQNLKVFEKYIVSALGEVTKAEFRQREDFKK

SEQ ID NO: 367 - protein, 984 aa, Campylobacter jejuni
MARILAFDIGISSIGWAFSENDELKDCGVRIFTKVENPKTGESLALPRRLARSARKRLARRKARLNHLKHLIANEFKLNYEDYQSFDESLAKAYKGSLISPYELRFRALNELLSKQDFARVILHIAKRRGYDDIKNSDDKEKGAILKAIKQNEEKLANYQSVGEYLYKEYFQKFKENSKEFTNVRNKKESYERCIAQSFLKDELKLIFKKQREFGFSFSKKFEEEVLSVAFYKRALKDFSHLVGNCSFFTDEKRAPKNSPLAFMFVALTRIINLLNNLKNTEGILYTKDDLNALLNEVLKNGTLTYKQTKKLLGLSDDYEFKGEKGTYFIEFKKYKEFIKALGEHNLSQDDLNEIAKDITLIKDEIKLKKALAKYDLNQNQIDSLSKLEFKDHLNISFKALKLITPLMLEGKKYDEACNELNLKVAINEDKKDFLPAFNETYYKDEVTNPVVLRAIKEYRKVLNALLKKYGKVHKINIELAREVGKNHSQRAKIEKEQNENYKAKKDAELECEKLGLKINSKNILKLRLFKEQKEFCAYSGEKIKISDLQDEKMLEIDHIYPYSRSFDDSYMNKVLVFTKQNQEKLNKTPFEAFGNDSAKWQKIEVLAKNLPTKKQKRILDKNYKDKEQKDFKDRNLNDTRYIARLVLNYTKDYLDFLPLSDDENTKLNDTQKGSKVHVEAKSGMLTSALRHTWGFSTKDRNNHLHHAIDAVIIAYANNSIVKAFSDFKKEQESNSAELYAKKISELDYKNKRKFFEPFSGFRQKVLDKIDEIFVSKPERKKPSGALHEETFRKEEEFYQSYGGKEGVLKALELGKIRKVNGKIVKNGDMFRVDIFKHKKTNKFYAVPIYTMDFALKVLPNKAVARSKKGEIKDWILMDENYEFCFSLYKDSLILIQTKDMQEPEFVYYNAFTSSTVSLIVSKHDNKFETLSKNQKILFKNANEKEVIAKSIGIQNLKVFEKYIVSALGEVTKAEFRQREDFKK

SEQ ID NO: 368 - protein, 984 aa, Campylobacter jejuni
MARILAFDIGISSIGWAFSENDELKDCGVRIFTKVENPKTGESLALPRRLARSARKRLARRKARLNHLKHLIANEFKLNYEDYQSFDESLAKAYKGSLISPYELRFRALNELLSKQDFARVILHIAKRRGYDDIKNSDDKEKGAILKAIKQNEEKLANYQSVGEYLYKEYFQKFKENSKEFTNVRNKKESYERCIAQSFLKDELKLIFKKQREFGFSFSKKFEEEVLSVAFYKRALKDFSHLVGNCSFFTDEKRAPKNSPLAFMFVTLTRIINLLNNLKNTEGILYTKDDLNALLNEVLKNGTLTYKQTKKLLGLSDDYEFKGEKGTYFIEFKKYKEFIKALGEHNLSQDDLNEIAKDITLIKDEIKLKKALAKYDLNQNQIDSLSKLEFKDHLNISFKALKLITPLMLEGKKYDEACNELNLKVAINEDKKDFLPAFNETYYKDEVTNPVVLRAIKEYRKVLNALLKKYGKVHKINIELAREVGKNHSQRAKIEKEQNENYKAKKDAELECEKLGLKINSKNILKLRLFKEQKEFCAYSGEKIKISDLQDEKMLEIDHIYPYSRSFDDSYMNKVLVFTKQNQEKLNKTPFEAFGNDSAKWQKIEVLAKNLPTKKQKRILDKNYKDKEQKDFKDRNLNDTRYIARLVLNYTKDYLDFLPLSDDENTKLNDTQKGSKVHVEAKSGMLTSALRHTWGFSTKDRNNHLHHAIDAVIIAYANNSIVKAFSDFKKEQESNSAELYAKKISELDYKNKRKFFEPFSGFRQKVLDKIDEIFVSKPERKKPSGALHEETFRKEEEFYQSYGGKEGVLKALELGKIRKVNGKIVKNGDMFRVDIFKHKKTNKFYAVPIYTMDFALKVLPNKAVARSKKGEIKDWILMDENYEFCFSLYKDSLILIQTKDMQEPEFVYYNAFTSSTVSLIVSKHDNKFETLSKNQKILFKNANEKEVIAKSIGIQNLKVFEKYIVSALGEVTKAEFRQREDFKK

SEQ ID NO: 369 - protein, 984 aa, Campylobacter jejuni
MARILAFDIGISSIGWAFSENDELKDCGVRIFTKVENPKTGESLALPRRLARSARKRLARRKARLNHLKHLIANEFKLNYEDYQSFDESLAKAYKGSLISPYELRFRALNELLSKQDFARVILHIAKRRGYDDIKNSDDKEKGAILKAIKQNEEKLANYQSVGEYLYKEYFQKFKENSKEFTNVRNKKESYERCIAQSFLKDELKLIFKKQREFGFSFSKKFEEEVLSVAFYKRALKDFSHLVGNCSFFTDEKRAPKNSPLAFMFVALTRIINLLNNLKNTEGILYTKDDLNALLNEVLKNGTLTYKQTKKLLGLSDDYEFKGEKGTYFIEFKKYKEFIKALGEHNLSQDDLNEIAKDITLIKDEIKLKKALAKYDLNQNQIDSLSKLEFKDHLNISFKALKLITPLMLEGKKYDEACNELNLKVAINEDKKDFLPAFNETYYKDEVTNPVVLRAIKEYRKVLNALLKKYGKVHKINIELAREVGKNHSQRAKIEKEQNENYKAKKDAELECEKLGLKINSKNILKLRLFKEQKEFCAYSGEKIKISDLQDEKMLEIDHIYPYSRSFDDSYMNKVLVFTKQNQEKLNKTPFEAFGNDSAKWQKIEVLAKNLPTKKQKRILDKNYKDKEQKDFKDRNLNDTRYIARLVLNYTKDYLDFLPLSDDENTKLNDTQKGSKVHVEAKSGMLTSALRHTWGFSTKDRNNHLHHAIDAVIIAYANNSIVKAFSDFKKEQESNSAELYAKKISELDYKNKRKFFEPFSGFRQKVLDKIDEIFVSKPERKKPSGALHEETFRKEEEFYQSYGGKEGVLKALELGKIRKVNGKIVKNGDMFRVDIFKHKKTNKFYAVPIYTMDFALKVLPNKAVARSKKGEIKDWILMDENYEFCFSLYKDSLILIQTKDMQEPEFVYYNAFTSSTVSLIVSKHDNKFETLSKNQKILFKNANEKEVIAKSIGIQNLKVFEKYIVSALGEVTKAEFIQREDFKK

SEQ ID NO: 370 - protein, 987 aa, Campylobacter jejuni
MARILAFDIGISSIGWAFSENDELKDCGVRIFTKVENPKTGESLALPRRLARSARKRLARRKARLNHLKHLIANEFKLNYEDYQSFDESLAKAYKGSLISPYELRFRALNELLSKQDFARVILHIAKRRGYDDIKNSDDKEKGAILKAIKQNEEKLANYQSVGEYLYKEYFQKFKENSKEFTNVRNKKESYERCIAQSFLKDELKLIFKKQREFGFSFSKKFEEEVLSVAFYKRALKDFSHLVGNCSFFTDEKRVPKNSPLAFMFVALTRIINLLNNLKNTEGILYTKDDLNALLNEVLKNGTLTYKQTKKLLGLSDDYEFKGEKGTYFIEFKKYKEFIKALGEHNLSQDDLNEIAKDITLIKDEIKLKKALAKYDLNQNQIDSLSKLEFKDHLNISFKALKLITPLMLEGKKYDEACNELNLKVAINEDKKDFLPAFNETYYKDEVTNPVVLRAIKEYRKVLNALLKKYGKVHKINIELAREVGKNHSQRAKIEKEQNENYKAKKDAELECEKLGLKINSKNILKLRLFKEQKEFCAYSGEKIKISDLQDEKMLEIDHIYPYSRSFDDSYMNKVLVFTKQNQEKLNQTPFEAFGNDSAKWQKIEVLAKNLPTKKQKRILDKNYKDKEQKNFKDRNLNDTRYIARLVLNYTKDYLDFLPLSDDENTKLNDTQKGSKVHVEAKSGMLTSALRHTWGFSAKDRNNHLHHAIDAVIIAYANNSIVKAFSDFKKEQESNSAELYAKKISELDYKNKRKFFEPFSGFRQKVLDKIDEIFVSKPERKKPSGALHEETFRKEEEFYQSYGGKEGVLKALELGKIRKVNGKIVKNGDMFRVDIFKHKKTNKFYGVPIYTMDFALKVLPNKAVARSKKGEIKDWILMDENYEFCFSLYKDSLILIQTKDMQEPEFVYYNAFTSSTVSLIVSKHDNKFETLSKNQKILFKNANEKEVIAKSIGIQNLKVFEKYIVSALGEVTKAEFRQREDFKNELR

SEQ ID NO: 371 - protein, 984 aa, Campylobacter jejuni
MARILAFDIGISSIGWAFSENDELKDCGVRIFTKVENPKTGESLALPRRLARSARKRLARRKVRLNHLKHLIANEFKLNYEDYQSFDESLAKAYKGSLISPYELRFRALNELLSKQDFARVILHIAKRRGYDDIKNSDDKEKGAILKAIKQNEEKLANYQSVGEYLYKEYFQKFKENSKEFTNVRNKKESYERCIAQSFLKDELKLIFKKQREFGFSFSKKFEEEVLSVAFYKRALKDFSHLVGNCSFFTDEKRAPKNSPLAFMFVALTRIINLLNNLKNTEGILYTKDDLNALLNEVLKNGTLTYKQTKKLLGLSDDYEFKGEKGTYFIEFKKYKEFIKALGEHNLSQDDLNEIAKDITLIKDEIKLKKALAKYDLNQNQIDSLSKLEFKDHLNISFKALKLITPLMLEGKKYDEACNELNLKVAINEDKKDFLPAFNETYYKDEVTNPVVLRAIKEYRKVLNALLKKYGKVHKINIELAREVGKNHSQRAKIEKEQNENYKAKKDAELECEKLGLKINSKNILKLRLFKEQKEFCAYSGEKIKISDLQDEKMLEIDHIYPYSRSFDDSYMNKVLVFTKQNQEKLNKTPFEAFGNDSAKWQKIEVLAKNLPTKKQKRILDKNYKDKEQKDFKDRNLNDTRYIARLVLNYTKDYLDFLPLSDDENTKLNDTQKGSKVHVEAKSGMLTSALRHTWGFSTKDRNNHLHHAIDAVIIAYANNSIVKAFSDFKKEQESNSAELYAKKISELDYKNKRKFFEPFSGFRQKVLDKIDEIFVSKPERKKPSGALHEETFRKEEEFYQSYGGKEGVLKALELGKIRKVNGKIVKNGDMFRVDIFKHKKTNKFYAVPIYTMDFALKVLPNKAVARSKKGEIKDWILMDENYEFCFSLYKDSLILIQTKDMQEPEFVYYNAFTSSTVSLIVSKHDNKFETLSKNQKILFKNANEKEVIAKSIGIQNLKVFEKYIVSALGEVTKAEFRQREDFKK

SEQ ID NO: 372 - protein, 721 aa, Campylobacter jejuni
MFVALTRIINLLNNLKNTEGILYTKDDLNTLLNEVLKNGTLTYKQTKKLLGLSDDYEFKGEKGTYFIEFKKYKEFIKALGDHSLSQDDLNEIAKDITLIKDEIKLKKALAKYDLNQNQIDSLSKLEFKDHLNISFKALKLITPLMLEGKKYDEACNELNLKVAINEDKKDFLPAFNETYYKDEVTNPVVLRAIKEYRKVLNALLKKYGKVHKINIELAREVGKNYSQRAKIEKEQNENYKAKKDAELECEKLGLKINSKNILKLRLFKEQKEFCAYSGEKIKISDLQDEKMLEIDHIYPYSRSFDDSYMNKVLVFTKQNQEKLNQTPFEAFGNDSAKWQKIEVLAKNLPTKKQKRILDKNYKDKEQKDFKDRNLNDTRYIARLVLNYTKDYLDFLPLSDDENTKLNNTQKGSKVYVEAKSGMLTSALRHTWGFSTKDRNNHLHHAIDAVIIAYANNSIVKAFSDFKKEQESNSAELYAKKISELDYKNKRKFFEPFSGFRQKVLDKIDEIFVSKPERKKPSGALHEETFRKEEEFYQSYGGKEGVLKALELGKIRKVNGKIVKNGDMFRVDIFKHKKTNKFYAVPIYTMDFALKVLPNKAVARSKKGEIKDWILMDENYEFCFSLYKDSLILIQTKDMQEPEFVYYNAFTSSTVSLIVSKHDNKFETLSKNQKILFKNANEKEVIAKSIGIQNLKVFEKYIVSALGEVTKAEFRQREDFKK

SEQ ID NO: 373 - protein, 512 aa, Campylobacter jejuni
MHKINIELAREVGKNHSQRAKIEKEQNENYKAKKDAEIECEKLGLKINSKNILKLRLFKEQKEFCAYSGEKIKLSDLQDEKMLEIDHIYPYSRSFDDSYMNKVLVFTKQNQEKLNKTPFEAFGNDSTKWQKIEVLAKNLPEKKQKRILDKNYKDKEQKDFKDRNLNDTRYIARLVLNYTKDYLDFLPLSDDENTKLNDTQKGSKVHVEAKSGMLTSALRHTWGFSAKDRNNHLHHAIDAAIIAYANNSIVKAFSDFKKEQESNSVELYAKKISELDYKNKRKFFEPFSGFRQKVLDKIDEIFVSKPERKKPSGALHEETFRKEEEFYQSYGGKEGVLKALELGKIRKVNGKIVKNGDMFRVDIFKHKKTNKFYAVPIYTMDFALKVLPNKAVARSKKGEIKDWILMDENYEFCFSLYKDSLILIQTKDMQEPELVYFNAFTSSTVSLIVSKHDNKFETLSKNQKILFKNANEKEVIAKSIGIQNLKVFEKYIVSALGEVTKAEFRQREDFKK

SEQ ID NO: 374 - protein, 965 aa, Campylobacter jejuni
MKIIGFNLGIANIGWALRENDEIIDCGVRVFDIPENPKNGNSLALERRENKARMKIVKRKKARMLATKTFLKKELNVDLSKLFLIGSTQSIYELRAKALSSLISKEELSAIILHIAKHRGYDDSALKNENGTIIEALNKNKETMLKFKSVGEYFYKNFVQNKEVKKIRNTTEDYSNSVPRSLLKQELDLILDKQKELGLIKNADFKEKLFEIIFFKRPLKDFSNKIGNCIFFENEKRAAKNTISACEFVALGKVVNLLKSIEKDIGIVYEKDSINEIMSIILDKTSISYKKIRDILNLPQEINFKGLDYSKNNVENSKLVDLKKLNEFKKALGDGFANLDKDILDSIATDITLTKDTATLKEKLKNYNVLNAEQIEKLSELVFNDHINLSLKALKQIIPLMYEGKRYDEACELCNFTIAKNQEKSEYLPLFEKTRFAKDISSPVVIRAICEFRKLLNDIIRRYGSVHKIHLELTRDFGISFSDRKKIIKEIEQNEQSRIKALETIKELKLEETSKNIQIVRLFEDQKGICPYSGLKMDLNRLDELVIDYIRPYNRSLDDSYSNKVLTFKKLSDLKQGKTPFEAFGEDEKLWAEINERIKEYNGKKRFKIFDKFFKDKKPFDFTEQTLQDTRWLTKLVASYLNEYLSFLPISEDENTALGYGEKGSKQHVILSSGMITQMLRNFWYLGFKNHKDYKNNAMDAIIVAFTTNSIIFAFNNFKKELDLAKAEFYANKISESDYLLKRKFLPPFSGFKEQALEKVKNIFVSHSLKIKNKGTLHDLTPLKIKELKNTYGDLDLAVKLGKIRKYNDKYYANANGSLVRADLFVDKKNKFHAVSIYKADFSTKKLPNKTPATTSNGETKEGIEMNENYNFCMSLYKNTPISVKIKGMKEPIICYYHGFNTSGSKITYKKHDNNYHNLSEDEMVVFRKNDKESIAVGKILEIKKYSISPSGELSLIENEERKWF

SEQ ID NO: 375 - protein, 759 aa, Campylobacter jejuni
MLSVAFYKRALKDFSHLVGNCSFFTDEKRAPKNSPLAFMFVALTRIINLLNNLKNTEGILYTKDDLNALLNEVLKNGTLTYKQTKKLLGLSDDYEFKGEKGTYFIEFKKYKEFIKALGEHNLSQDDLNEIAKDITLIKDEIKLKKALAKYDLNQNQIDSLSKLEFKDHLNISFKALKLITPLMLEGKKYDEACNELNLKVAINEDKKDFLPAFNETYYKDEVTNPVVLRAIKEYRKVLNALLKKYGKVHKINIELAREVGKNHSQRAKIEKEQNENYKAKKDAELECEKLGLKINSKNILKLRLFKEQKEFCAYSGEKIKISDLQDEKMLEIDHIYPYSRSFDDSYMNKVLVFTKQNQEKLNKTPFEAFGNDSAKWQKIEVLAKNLPTKKQKRILDKNYKDKEQKDFKDRNLNDTRYIARLVLNYTKDYLDFLPLSDDENTKLNDTQKGSKVHVEAKSGMLTSALRHTWGFSTKDRNNHLHHAIDAVIIAYANNSIVKAFSDFKKEQESNSAELYAKKISELDYKNKRKFFESFSGFRQKVLDKIDEIFVSKPERKKPSGALHEETFRKEEEFYQSYGGKEGVLKALELGKIRKVNGKIVKNGDMFRVDIFKHKKTNKFYAVPIYTMDFALKVLPNKAVARSKKGEIKDWILMDENYEFCFSLYKDSLILIQTKDMQEPEFVYYNAFTSSTVSLIVSKHDNKFETLSKNQKILFKNANEKEVIAKSIGIQNLKVFEKYIVSALGEVTKAEFRQREDFKK

SEQ ID NO: 376 - protein, 984 aa, Campylobacter jejuni
MVRILAFDIGISSIGWAFSENDELKDCGVRIFTKVENPKTGESLALPRRLARSARKRLARRKARLNHLKHLIANEFKLNYEDYQSFDESLAKAYKGSLISPYELRFRALNELLSKQDFARVILHIAKRRGYDDIKNSDDKEKGAILKAIKQNEEKLANYQSVGEYLYKEYFQKFKENSKEFTNVRNKKESYERCIAQSFLKDELKLIFKKQREFGFSFSKKFEEEVLSVAFYKRALKDFSHLVGNCSFFTDEKRAPKNSPLAFMFVALTRIINLLNNLKNTEGILYTKDDLNALLNEVLKNGTLTYKQTKKLLGLSDDYEFKGEKGTYFIEFKKYKEFIKALGEHNLSQDDLNEIAKDITLIKDEIKLKKALAKYDLNQNQIDSLSKLEFKDHLNISFKALKLITPLMLEGKKYDEACNELNLKVAINEDKKDFLPAFNETYYKDEVTNPVVLRAIKEYRKVLNALLKKYGKVHKINIELAREVGKNHSQRAKIEKEQNENYKAKKDAELECEKLGLKINSKNILKLRLFKEQKEFCAYSGEKIKISDLQDEKMLEIDHIYPYSRSFDDSYMNKVLVFTKQNQEKLNKTPFEAFGNDSAKWQKIEVLAKNLPTKKQKRILDKNYKDKEQKDFKDRNLNDTRYIARLVLNYTKDYLDFLPLSDDENTKLNDTQKGSKVHVEAKSGMLTSALRHTWGFSTKDRNNHLHHAIDAVIIAYANNSIVKAFSDFKKEQESNSAELYAKKISELDYKNKRKFFEPFSGFRQKVLDKIDEIFVSKPERKKPSGALHEETFRKEEEFYQSYGGKEGVLKALELGKIRKVNGKIVKNGDMFRVDIFKHKKTNKFYAVPIYTMDFALKVLPNKAVARSKKGEIKDWILMDENYEFCFSLYKDSLILIQTKDMQEPEFVYYNAFTSSTVSLIVSKHDNKFETLSKNQKILFKNANEKEVIAKSIGIQNLKVFEKYIVSALGEVTKAEFRQREDFKK

SEQ ID NO: 377 - protein, 1003 aa, Campylobacter lari]
MRILGFDIGINSIGWAFVENDELKDCGVRIFTKAENPKNKESLALPRRNARSSRRRLKRRKARLIAIKRILAKELKLNYKDYVAADGELPKAYEGSLASVYELRYKALTQNLETKDLARVILHIAKHRGYMNKNEKKSNDAKKGKILSALKNNALKLENYQSVGEYFYKEFFQKYKKNTKNFIKIRNTKDNYNNCVLSSDLEKELKLILEKQKEFGYNYSEDFINEILKVAFFQRPLKDFSHLVGACTFFEEEKRACKNSYSAWEFVALTKIINEIKSLEKISGEIVPTQTINEVLNLILDKGSITYKKFRSCINLHESISFKSLKYDKENAENAKLIDFRKLVEFKKALGVHSLSRQELDQISTHITLIKDNVKLKTVLEKYNLSNEQINNLLEIEFNDYINLSFKALGMILPLMREGKRYDEACEIANLKPKTVDEKKDFLPAFCDSIFAHELSNPVVNRAISEYRKVLNALLKKYGKVHKIHLELARDVGLSKKAREKIEKEQKENQAVNAWALKECENIGLKASAKNILKLKLWKEQKEICIYSGNKISIEHLKDEKALEVDHIYPYSRSFDDSFINKVLVFTKENQEKLNKTPFEAFGKNIEKWSKIQTLAQNLPYKKKNKILDENFKDKQQEDFISRNLNDTRYIATLIAKYTKEYLNFLLLSENENANLKSGEKGSKIHVQTISGMLTSVLRHTWGFDKKDRNNHLHHALDAIIVAYSTNSIIKAFSDFRKNQELLKARFYAKELTSDNYKHQVKFFEPFKSFREKILSKIDEIFVSKPPRKRARRALHKDTFHSENKIIDKCSYNSKEGLQIALSCGRVRKIGTKYVENDTIVRVDIFKKQNKFYAIPIYAMDFALGILPNKIVITGKDKNNNPKQWQTIDESYEFCFSLYKNDLILLQKKNMQEPEFAYYNDFSISTSSICVEKHDNKFENLTSNQKLLFSNAKEGSVKVESLGIQNLKVFEKYIITPLGDKIKADFQPRENISLKTSKKYGLR

SEQ ID NO: 378 - protein, 372 aa, candidate division
DNESAINQIAYILTTQKADEGIRAELDSLPLSDKAKKAIVKIKPTNFKAFGHLSIKALQKITPHILEGMTYDKACEAAGYDFKKQSASLEQITNPVVKRAITQTLKVVRAIERKYGKPYFIKVETARDLAKNFKDRNAIKKENEENQGYNEDIKSIITNGYEASPKTKGGKQLLNHLKEFNVRLNKNADFNGQQIIKVKLYREQQGKCLYSGNPIDFETMLRDDNAYQVDHIVPFSRSNNDGITNKVLVFTEENQKKADRTPFEYFGTDERRWEKFVALVETTYKTRDVKTSDKATNAINYEYNGYAMKKKQNLLLQDYKNDSWNVRALNDTRYITRFIQNYLRQNVDFAEGEEKQRIIAPNGTTTAYLRKR

SEQ ID NO: 379 - protein, 1117 aa, Capnocytophaga ochracea
MKHILGLDLGSNSIGWAFVQQDFENKQGKIIATGSRIIPMDQGILGDFERGNTVSQTAERTTYRSMRRLRERHLLRRERLHRVLHLLGFLPPHYDAQIDFTKRYGKFIDNAEPKIAYNNGNFIFMNSFNEMVEDFKKHQPQLFYKKSNGEESRIPYDWTIYYLRKKALSQKITQQELAWLILHFNQKRGYYQLRGEEETENPNKEVAFHSLKVVDVEAEAPNKKGEIWYTIRLENGWIYRRTSKNPLDDWKGKTRDFIVTTDLNDDGTIKLDKEGKEKRSFRAPDENDWNLLKKKTEHDIDFSGKPVGTYIYDHLLQNPNQKIKGKLVRTIERKYYKDELKAILAKQIALQPELFTETLLADCIRELYRKNETQQQNLLSKDFLHLFVEDIIFYQRPLCSKKSTIANCTLEKRSYIDKETNERKDAPIKVCAKSNPYYQEFRVLQWLQNLRIYEIETDREVTAEFIETPQDYEALFNFLMSQKEIDNEGLLKYFLFAKNPQIKDKAAKSELKKWLTTYRWNYVYDAADNSSKKYPMNETGYELQRYLQKVEGLPANFLTFDITYQLWHLLYSVKDKVEFEKALKKFAKKKQLDKTSFVDSFKNFKPYPNEYGSFSEKAIKKLLPLMRFGNHWDFNRIDVSTQKRIDDLINGVANEDIRTIIREKAEKYQLNSETCFQDLPLWLAQYVVYNRHAEATDIEKWTSVSDLEAYLEDFKQHSLRNPIVEQVVTETLRVVRDIWQQYSGGQANFFDEIHIELGRELKKTAEERKQLSDKNQENENTNLRIKKLLAELKEDASIQNVRPYSLVQQELLKIYEEGVFSSTDEIEEDIQKIRKKVEPTPPEIQRYKLWLEQKYKSPYTGEVISLTKLFTEEYEIEHIIPQSRYYDDSLSNKVICESAVNKLKTNQLGLEFIQNHHGEKVRITANKEVTIFTEEQYKEFVKKHYANNSAKQQKLLLNEIPEKMVARQLNDTRYISKCISEILSKIVRSDEKDEGVNSKNIIPCTGKITTALKQDWGLNDVWNELILPRFERMNQLTQTQLFTSYNDRLQKNLPTVPIEYSQGFQKKRIDHRHHAMDALVIACATREHINYMNNQHALDKSKDKKEKQQSRIDLHPL

SEQ ID NO: 380 - protein, 303 aa, Capnocytophaga ochracea
MSFKQNLRVINKATNYYEKWEEKNGVLVKKKVKQEGTNWAIRKPLHKETVSGKIVLDRKIGKDKILTATRKAVDITFTEKIISSITDTGIQKILLNYLKYKGSPEVAFSAEGLEELNKNIAQYNDGKKHQPIYKVRIFEEGSKFPLGETGAKATKYVEAAKGTNLFFGVYQGKEKRTYATIPLNEVIERQKQGLPSVPERNEKGEPLLFSLSPNDLVYVPMEGEIAETIDFNNLSKEQKERIYKTVSFTGNQCFFVQEAVASPIVNKMEYSPLNKMERDILGIMIKEVCVKLKVDRLGNIIKA

SEQ ID NO: 381 - protein, 1471 aa, Capnocytophaga sp.
MCKYFYIKNFITFVLSKSIIPMKHILGLDLGSNSIGWAFVQQDFENKQGKIIATGSRIIPMDQGILGDFERGNTVSQTAERTTYRSTRRLRERHLLRRERLHRVLHILGFLPPHYDAQIDFTKRYGKFIDNAEPKIAYNNGNFIFMNSFNEMIEDFKKHQPQLFYKKSNGEESKIPYDWTIYYLRKKALSQKITQQELAWLILHFNQKRGYYQLRGEEETENPNKEVAFHSLKVVDVEAEAPNKKGEIWYTIRLENGWIYRRTSKIPLDDWKGKTRDFIVTTDLNDDGTIKVDKEGKEKRSFRAPDENDWNLLKKKTEHDIDFSGKTVGAYIYDHLLQNPNQKIKGKLVRTIERKYYKDELKAILAKQIALQPELFTETLLADCIRELYRKNETQQQNLLSKDFLHLFVEDIIFYQRPLRSKKSTIANCTLEKRSYIDKETNERKDAPIKVCAKSNPYYQEFRVLQWLQNLRIYEIETDREVTAEFIETPQDCEALFNFLMSQKEIDNKGLLKYFLFAKNPQIKDKAAKSELKKWLTTYRWNYVYDAADNSSKKYPMNETGYELQRYLQKVEGLPANFLTFDITYQLWHLLYSVKDKVEFEKALKKFAKKKQLDKTSFVDSFKNFKPYPNEYGSFSEKAIKKLLPLMRFGNHWDFNRIDVSTQKRIDDLINGVANEDIRTIIREKAEKYQLNSETCFQDLPLWLAQYVVYNRHAEATDIEKWTSVSDLEAYLEDFKQHSLRNPIVEQVVTETLRVVRDIWQQYGGGQANFFDEIHIELGRELKKTAEERKQLSDKNQENESTNLRIKKLLAELKEDASIQNVRPYSLVQQELLKIYEEGVFSATDEVEEDIQKIRKKAEPSKADLQRYKLWLEQKYKSPYTGEVISLTKLFTEEYEIEHIIPQSRYYDDSLSNKVICESAVNKLKTNQLGLEFIQNHHGEKVRITANKEVTIFTEEQYKEFVKKHYANNSAKQQKLLLNEIPEKMVARQLNDTRYISKYISEILSKIVRSDEKDEGVNSKNIIPCTGKITTALKQDWGLNDVWNKLILPRFERMNQLTQTQLFTSYNDRLQKNLPTVPIEYSQGFQKKRIDHRHHAMDALVIACATREHINYMNNQHALDKSKDKKEKQQSRIDLRTILCEKKNNNWQFKKPWSTFTQEAKEALEHIVVSFKQNLRVINKATNYYEKWEEKNGVLVKKKVKQEGTNWAIRKPLHKETVSGKIVLDRKIGKDKILTATRKAVDITFTEKIISSITDTGIQKILLNYLKYKGSPEVAFSTEGLEELNKNIAQYNNGKKHQPIYKVRIFEEGSKFPLGETGAKATKYVEAAKGTNLFFGVYQGKGKRTYATIPLNEVIERQKQGLPSVPERNEKGEPLLFSLSPNDLVYVPMEGEIAETIDFNNLSKEQKERIYKTVSFTGNQCFFVQEAVATPIVNKMEYSPLNKMERDILGTMIKEVCIKLKVDRLGNITKA

SEQ ID NO: 382 - protein, 1450 aa, Capnocytophaga sp.
MKHILGLDLGSNSIGWAFVQQDFENKQGKIIATGSRIIPMDQGILGDFERGNTVSQTAERTTYRNTRRLRERHLLRRERLHRVLHILGFLPPHYDSQIDFTKRYGKFIDNAEPKIAYNNGNFIFMNSFNEMIEDFKKYQPQLFYKKSNGEESKIPYDWTIYYLRKKALSQKITQQELAWLILHFNQKRGYYQLRGEEETENPNKEVAFHSLEVVDVEAEAPNKKGEIWYTIRLENGWIYRRTSKIPLDDWKGKTRDFIVTTDLNDDGTIKLDKEGKEKRSFRAPDENDWNLLKKKTEHDIDFSGKTVGAYIYDHLLQNPNQKIKGKLVRTIERKYYKDELKAILAKQIALQPELFTETLLADCIRELYRKNETQQQNLLSKDFLHLFVEDIIFYQRPLRSKKSTIANCTLEKRSYIDKETNERKDTPIKVCAKSNPYYQEFRVLQWLQNLRIYEIETDREVTAEFIETAQDNEALFNFLMSQKEIDNESLLKYFLFAKNPQIKDKVAKSELKKWLTTYRWNYVYDAADNSSKKYPMNETGYELQQYLQKVEGLPANFLTFDITYRLWHLLYSVKDKVEFEKALKKFAQEYQLDEASFVDSFKNFKPYPNEYGSFSEKAIKKLLPLMRFGNHWDFNRIDVSTQKRIDDLINGVANDEIRTIIREKAEKYQLNSETCFQGLPLWLAQYVVYNRHAEAADIEKWTSVNDLEAYLEDFKQHSLRNPIVEQVITETLRVVRDIWQRYGGGQANFFDEIHIELGRELKKTAEERKQLSNRNQENENTNLRIKKLLAELKEDASIQNVRPYSPVQQELLKIYEEGVFSATDEVEEDIQKIRKKAEPTTPEIQRYKLWLEQKYKSPYTGEVISLTKLFTEEYEIEHIIPQSRYYDDSLSNKVICESAVNKLKTNQLGLEFIQNHHGEKVRITANKEVTIFTEEQYKEFVKKHYANNSAKQQKLLLNEIPEKMVARQLNDTRYISKYISEILSKIVRSDEKDEGVNSKNIIPCTGKITTALKQDWGLNDVWNELILPRFERMNQLTQTQLFTSYNDRFQKNLPTVPIEYSQGFQKKRIDHRHHAMDALVIACATREHINYMNNQHALDKSKDKKEKQQSRIDLRTILCEKKNNNWQFKKPWSTFTQEAQEALEHIVVSFKQNLRVINKATNYYEKWEEKNGVLVKKKVKQEGTNWAIRKPLHKETVSGKIVLDRKIGKDKILTATRKSVDITFTEKIISSITDTGIQKILLNYLKYKGSPEVAFSAEGLEELNKNIAQYNDGKKHQPIYKVRIFEEGSKFPLGETGAKATKYVEAAKGTNLFFGVYQGKGKRTYATIPLNEVIERQKQGLPSVPERNEKGEPLLFSLSPNDLVYVPMEGEIAETIDFNNLSKEQKERIYKTVSFTGNQCFFVQEAVATPIVNKIEYSPLNKMERDILGTMIKEVCIKLKVDRLGNITKA

SEQ ID NO: 383 - protein, 1435 aa, Capnocytophaga sp.
MKNILGLDLGTTSIGFAHIVEDENKEKSEIKELGVRIVSLATDEQSDFEKGKSISTNANRTLKHGARLNLDRYQQRRKFLIDLLQKANLITSASILAENGKNTTHSTWQLRAKAVTERIEKEEFARVLLAINKKRGYKNSRKTKTEDEGQAIDGMAIAKCLYDENLTPGQLSLQLLQQNKKLLPDFYRSDLQKEFDLVWNLQKQFYPDILTDSFYKELQGKGKDATSKAFSKRYHFDTAENKGSKESVRLQAYQWRAEAISKQLSKEEVAYVLTEINNNLNNSSGYLGAISDRSKELYFNRQTVGQYLYAQLQENRHNSLKNKVFYRQDYLDEFERIWETQASFHKELTDELKKQIRDVVIFYQRKLKSQKGLVSFCEFESKEIEIEKDGKAITKSIGARVVPKSSPLFQEFKIWQILNNVTCKRKGIRKKKSSAKSTELDLFNEPSQSIFSLDMECKQLLFDELNLKGDLKSDKVLKLLGYSPQEWEINYNQLEGNRTQKSLYEAYLKIIEIEGYEVKDILQIKSTKDDWSLDESPLSASEIRERVKVIFQTLGICTKILYFDPLLPVKEFEQQYSYQLWHLLYSYESDDSTSGNETLYRILEKKYAFKREHATILANVALQDDYGSLSTKAIRKIYPYIKENQYSTACELAGYKHSKLSLTTEELEARELKNIIPLLKKNALRNPVVEKILNQMINVVNALIEKNSERDAEGKITKYFHFDEIRIELARELKKNAQERYEMTQNINKAKLEHQKISEKLQKQFGIKNPTKSDIIRYRLYQELEHNGYKELYTNTYIAPDVLFSKNIDIEHIVPKARVFDDSFSNKTLAFKEFNIKKGESTAFDYITSLNCEGELNQYLTRVENAYKTKSISLTKYKNLLKKASEIGDGFINRDLRDTQYIAKKAKEILFQVTKNVLSTSGSITDRLREDWGLVDVMKELNMPKYQSLGLTEVEERKDGNKVTVIKDWTKRNDHRHHAMDALTVAFTKPSYIQYLNHLNARKDENNKNYSVILAIEKKETIKVPINNGKNKRVFIEPILNFRQVAKKHLEEIFISHKAKNKVVTKNINKPAGTDKQQITLTPRGQLHKETIYGKYQYYVNKEEKVGVKFDERTITKVSNPLYREALLKRLQANDNDPKKAFAGKNALSKNPIYLDEAKTKTLPEKVNLTYLEEDFSIRKDISPDNFKDLKSIEKVIDQGVKRILIKRLQAYDNDPKKAFVDLEKNPIWLNKEKGIAIKRVTISGVSNAQPLHIGKDHLGKTTLNKEGKEVPVDYVSTGNNHHVAIYRDKEGNLQEQIVSFFEAVVRAQQGLPIIDKNYKQAEGWQFMFTMKQNEMFVFPNEATGFNPAEIDLLDPKNKKLISPNLFRVQTISIVKYGNSVVRDFKFRHHLETTLQDDKILQGITFQQIKSLEPLRNIVKVRINHLGDIVNIGEY

SEQ ID NO: 384 - protein, 1432 aa, Capnocytophaga sp.
MKNILGLDLGTTSIGFAHIVEDENKEKSEIKELGVRIVSLTTDEQSDFEKGKSITTNANRTLKHGARLNLDRYQQRRKYLIDLLHKANLITPSSILAENGKNTTHSTWQLRAKAVTERIEKEEFARILLAINKKRGYKSSRKAKTEDEGQAIDGMAIAKRLYDENLTPGQLSLQLLQQNKKLLPDFYRSDLQKEFDLVWNFQKQFYPDILTDIFYKELQGKGKDATSKAFSKRYHFDTAENKGSKESVRLQAYQWRAEAVSKQLSKEEVAYVLTEINNNLNNASGYLGAISDRSKELYFNRQTVGQYLYAQLQENRHNSLKNKVFYRQDYLDEFERIWETQALFHKELTDELKKQIRDVVIFYQRKPKSQKGLISFCEFESKEIEIEKDGKTITKNIGARVVPKSSPLFQEFKIWQILNNVICKRKGIRKKKISAKTTQLDLLNESSQTIFSLDMECKQLLFDELNLKGDLKSDKVLKLLGYSPQEWEINYNQLEGNRTQKALYEAYLKIVEMEAHDVKDILQIKSTKDDWSLDESPLSASEIRESVKAIFQALGICTKILYFDPLLPVKDFEEQDSYQLWHLLYSYESDDSTSGNETLYRILEKKYAFKREHARILANVALQDDYGSLSTKAIRKIYPNIKENQYSTACEMAGYKHSKLSLTTEELEARELKNIIPLLKKNALRNPVVEKILNQMINVVNALIEKNSERDAEGKITKYFHFDEIRIELARELKKNAQKRYEMTQNINKAKSEHQKISEILQKEFGIKNPTKSDIIRYRLYKELEHNGYKELYTNTYIAPDVLFSKNIDIEHIVPKARVFDDSFSNKTLAFKDFNIKKGESTAFDYITSLKNEEKLNQYLARVENAYKTKNISPAKYKNLLKKASEIGDGFINRDLRDTQYIAKKAKEILFQVTKNVLSTSGSITDRLREDWSLVDVMKELNMPKYQSLGLTEVEERKDGNKVTVIKDWTKRNDHRHHAMDALTVAFTKPSYIQYLNHLNARKDENNKNYSVILAIEKKETIKVPTNNGKNKRVFIEPIPNFRQVAKKHLEEIFISHKAKNKVVTKNTNKPAGTNKQQITLTPRGQLHKETIYGKYQYYVNKEEKVGVKFDKETIAKVSNPLYREALLKRLQANDNDPKKAFTGKNALSKNPIYLDEAKTKTLPEKVNLTYLEEDFSVRKKIVPKNPTSKEFVPNLKSIEKVVDEGVRNILIERLRVYNNDPEKAFVDLEKNPIWLNKEKGIAIKRVTISGVNNAQPLHIGKDHLGKTTLNKEGKEIPVDYVSTGNNHHVAIYRDKEGNLQEQIVSFFEAVVRTQQGLPIIDKTYKQEEGWQFLFTMKQNEMFVFPNEATGFNPAEIDLLDPKNKKQISPNLFRVQKIATKDYFFRHHLETNVETDNVLKNTTWKREGLSGLKDIVKVRINHLGDIVSIGEY

SEQ ID NO: 385 - protein, 1426 aa, Capnocytophaga sp.
MKNILGLDLGTTSIGFTHIVEDENKEKSEIKELGVRIVSLTTDEQSDFEKGKSISTNANRTLKHGARLNLDRYQQRRKFLIDLLQKANLITSSSILAENGKNTTHSTWQLRAKAVTERIEKEEFARVLLAINKKRGYKSSRKAKTEDEGQAIDGMAIAKRLYDENLTPGQLSLQLLQQNKKLLPDFYRSDLQKEFDLVWNFQKQFYPDILTDSFYKELQGKGKDATSKAFSKRYHFDTAENKGSRESVRLQAYQWRAEAISKQLSKEEVAYVLTEINNNLNNASGYLGAISDRSKELYFNRQTVGQYLYAQLQENKHNSLKNKVFYRQDYLDEFERIWETQASFHKELTEELKKQIRDVVIFYQRKLKSQKGLISFCEFESKEIEIEKDGKTITKSIGARVVPKSSPLFQEFKIWQILNNVTCKRKGIRKKKSSAKSTELDLFNEPSQTIFSLDMECKQLLFEELNLKGDLKSDKVLKLLGYSPQEWEINYNQLEGNRTQKALYEAYLKIVEMEAHDVKDILQIKSTKDDWALEESPLSASEIRERVKAIFQTLGICTKILYFDPLLPVKEFEEQDSYQLWHLLYSYESDDSTSGNETLYRILEKKYAFKREHATILANVTLQDDYGSLSTKAIRKIYPYIKENQYSTACEKAGYKHSKLSLTTEELEARELKNIIPLLKKNALRNPVVEKILNQMINVVNALIEKNSERDAEGKITKYFHFDEIRIELARELKKNAQERYEMTQNINKAKLEHQKISGILQKEFGIKNPTKSDITRYRLYQELAHNGYNDLYTNTYIPKELLFSKNIDIEHIVSKARVFDDSFSNKTLAFREFNIKKGESTAFDYITSLNNEEELNQYLNRVENAYKTKNISPAKYKNLLKKASEIGDGFINRDLRDTQYIAKKAKEILFQVTKNVLSTSGSITDRLREDWGLVDVMKELNMPKYQSLGLTEVEERKEGNKVTVIKNWTKRNDHRHHAMDALTVAFTKPSYIQYLNHLNARKDKNNKNYSVILAIEEKETIKVPTNNGKNKRVFIEPIPNFRQVAKKHLEEIFISHKAKNKVVTKNTNKPAGTDKQQITLTPRGQLHKETVYGKYQYYVNKEEKIGVKFDKETIAKVSNPVYREALLKRLQANDNDPKKAFAGKNALSKNPIYLDEAKTKTLTEKVNLTYLEEDFSIRKDISPDNFKDLKSIEKVIDQGVKRILIKRLQDYDNDPKKAFVDLEKNPIWLNKEKGIAIKRVTISGVNNAQPLHIGKDHLGKTTLNKEGKEIPVDYVSTGNNHHVAIYRDKEGNLQEQIVSFFEAVVGAQQGLPIVDKTYKQAEGWQFLFTMKQNEMFVFPNEATGFNPAEIDLLDPKNKKQISPNLFRVQKIATKDYFFRHHLETNVDTDNVLKNTTWKREGLSGLKDIVKVRINHLGDIVSIGEY

SEQ ID NO: 386 - protein, 1450 aa, Capnocytophaga sp.
MKRILGLDLGSNSIGWAFVEQDFENKQGKIIATGSRIIPMDQGILGDFEKGNTVSQTAERTTYRSMRRLRERHLLRRERLHRVLHILGFLPPHYDAQIDFTKRYGKFIDNAEPKIAYNNGNFIFMNSFNEMIEDFKKYQPQLFYKKSNGEESKIPYDWTIYYLRKKVLSQKITQQELAWLILHFNQKRGYYQLRGEEETENPNKEVAFHSLKVVDVEAEAPNKKGEIWYTIRLENGWIYRRTSKIPLDDWKGKTRDFIVTTDLNDDGTIKVDKEGKEKRSFRAPDENDWNLLKKKTEHDIDFSGKTVGAYIYDHLLQNPNQKIKGKLVRTIERKYYKDELKAILAKQIALQPELFTETLLADCIRELYRKNETQQQNLLSKDFLHLFVEDIIFYQRPLRSKKSTIANCTLEKRSYIDKETNERKDTFIKVCAKSNPYYQEFRVLQWLQNLRIYEIETDREVTAEFIETAEDYEALFNFLMSQKEIDNEGLLKYFLFAKNPQIKDKVAKSELKKWLTTYRWNYVYDAADNSSKKYPMNETGYDLQRYLQKVEGLPANFLTFDITYRLWHLLYSVKDKVEFEKALKKFAQEYQLDEASFVDSFKNFKPYPNEYGSFSEKAIKKLLPLMRFGNHWDFNRIDVSTQKRIDDLINGVANDEIRTIIREKAEKYQLNSESCFQGLPLWLAQYVVYNRHAEATDIEKWTSVSDLETYLEDFKQHSLRNPIVEQVVTETLRVVRDIWQQYGGGQANFFDEIHIELGRELKKTAEERKQLSNRNQENENTNLRIKKLLAELKEDASIQNVRPYSPVQQELLKIYEEGVFSSTDQVEEDIQKIRKKAEPTTPEIQRYKLWLEQKYKSPYTGEVISLTKLFTEEYEIEHIIPQSRYYDDSLSNKVICESAVNKLKTNQLGLEFIQNHHGEKVRITGNKEVTIFTEEQYKEFVKKHYANNSAKQQKLLLNEIPEKMVARQLNDTRYISKYISEILSKIVRSDEKDEGVNSKNVIPCTGKITTALKQDWGLNDVWNELILPRFERMNQLTQTQLFTSYNDRFQKNLPTVPIEYSQGFQKKRIDHRHHAMDALVIACATREHINYMNNQHALDKNKDKKEKQQSRIDLRTILCEKKNNNWQFKKPWSTFTQETKEALEHIVVSFKQNLRVINKATNYYEKWEEKNGVLVKKKVKQEGTNWAIRKPLHKETVSGKIVLDRKIGKDKILTATRKEVDITFTEKIISSITDTGIQKILLNYLNYKGSPEVAFSAEGLEELNKNIAQYNDGKKHQPIYKVRIFEEGSKFPLGETGAKATKFVEAAKGTNLFFGVYQGKEKRSYATIPLNEVIERQKQGLPSVPERNEKGEPLLFSLSPNDLVYVPMEGEIAETIDFNNLSKEQKERIYKTVSFTGNQCFFVQEAVATPIVNKMEYSPLNKMERDILGTMIKEVCIKLKVDRLGNITKA

SEQ ID NO: 387 - protein, 1437 aa, Capnocytophaga sp.
MKYIKYILGLDIGSNSIGWALIQLDLLQKTKRIIATGSRIIPMDQKVLSDFGKGITISPTAQRTSYRNARHCRERHLLRRERLHRVLHILGFLPTHYDKQIDFSKRYGKFVDNTEPKIAYNERKFLFMDSFQEMLADFKIHQPDLFYTKKNGEESKIPYDWTIYYLRKKALSRKISKEELAWIILNFNQKRGYYQLREEEEENKENDFEIISSKIISVIKKDKDKKYNKYWYDIILENGLVYQAAFYNDFVYNWINQDREFIIERISLKNGTEKVKLSYLPTFDEIDKMDKKEQDKYYKKIKIKTENSIGNKTVGCYIYDHILQNPNEKIKGKLVRTIERKYYKEELKAILEKQVALQPELFTDQLFADCIRELYSKNEAQQRNLAARDFVHLFVEDIIFYQRSLRRQKSTLANCSLESRSYIDKDSHTRKEAPLKVCPKSNPYYQEFRVLQWLQNLKIYEIDTDQEVTHEFIKTLEDKQQFFDFLMNQKEIDCEELLKYFLNQTYPNAREKALKSELKKWKDTYRWNYVYDIGEKSSKKYPMNETRYELKRHLEKVANLPDDFLSSEVEYLLWHLIYSVKDKVAYEKGLKTFAQKHHLDKDSFVESFKKFKPYPSEYGSFSEKAIRKLLPLMRFGSYWDFNHIDKNTQKRIEDLITGVENEEIRTILREKAEKYQLEKETDFQDLPLWLAQYIVYNRHAEASSLEKWTSVNDLETYLNEFKQYSLRNPIVEQVVMETLRVVRDIWQQYGQGQASFFDEIHIELGRELKKTAKEREKLSKQNQKNEDINLSIKEKLKELEKYNTRAYSITHQEKYKLWLEQKHISPYTGQIISPENLFTDNYEIEHIIPQSRFFDDSLSNKVVCESIVNKAPYKDRQLGLEFIKNQGGRIVKELSTENKTIKIFTEEQYRTFIKEHYSNNPEKTKKLLLEEIPEKMVARQMNDTCYISKFISEILSKIVRSDEQDEGVHSKNVILCTGKITSALKQDWGVNDVWNDLILPRFERMNDLTQSTLFTTYNEKYQKYLPTVPMEYSNGFQKKRIDHRHHAMDAIIIACATREHINYINNQHALEKGKDKKEKQKEHDKLREKLCIKKDNKGSEENYSWIFKKPWDTFTQEVQAALEGIVVSFKQNLRVINKATNYYERWVEENGKYIKKMVKQEGTNWAIRKPLHEETISGKIYLDREEITKNDILTATRKTVDSSFDEKRIKKITDTGIQKILLNYLKYKGSPEIAFSPEGLEELNKNLSIYNDGKPHKPIYKVRIYEKGSGRFALGEKGRKYKKYVQGAPNLYFGIYQGANKRSFATIPLNEVIERQKQGRPSIPEYNEKGDPLLFSLSPNDLVYVPVEGEIIEDIDFQNLSKEQKERIYNVNDFSSTCYFTPNRIAKAIFPKEVDLQRKGDKLPGSYDTKTASLEGIQIKEVCIKLKIDRLGNISKA

SEQ ID NO: 388 - protein, 1140 aa, Catellicoccus marimammalium
MKNMTKVNVGLDVGISSAGWSVINAETNQILESGVRLFSGSDADENVNRRNQRQGRRLFRRRKLRIQEAKKYLENVFQLKDIEPKDEWNPYEIRVRALNEKVSKEELSIALLNIVKHRGISYELEDVTDEEGTNTQSFQSGLDYNRRLLKTKTVGEIQYDRLQKYGQVRGQIQTEDGLLINIFPTKNYVEEVERILETQKKYHPEIDDVFIEKIISFVTRKREYFVGPGNEKSRTDYGIYRENGETLDNLFEILIGKDKFYPEEYRAAGSSYTAQIFNLLNDLNNLRIPTTEDHHLTKAQKEEIITELKNTSRLSGGMLKLISKVTKAPKEEISGYRKDEKDKPDLHSLAYYRKQKNMLEKEGIQIADFSEELLDELATMMTLNTEPGEIRKQLNKITNQYDILTPEVIEVLVKNHTAFVATSNHKWHRFSLKLMKEFIPELLETSKEQSTILCERGFIQNRASYLDENHHFNYAELRENLYNPVVRKSTCEMLKVFTAIQEKYPNIQNVIVELPRETNEDEQKRKIKKINDNNAKRKKEILKEAQAQSGLSEEALEEKLLKTKGLYLKLMLWYEQEGKCVYSGQEIPLSDLLQNKGGYEVDHIIPISISFDDRLCNKVLVRQQLNSQKSNQTPFEYMTTHTDGHLSFHELKELVGKNKRFSKEKRELLLAEIYSNDIETRKRFINRNLVDTSYTARIVLNALQQYKKENQLSMNVSVVRGAMTNILRKKVKLDKTRETFHHHAIDASLMAVIPNIEFFKERKEWLPKSANEEVVEVEVSEEETMPEKEFKVKMRLPESFIQDVQILQRNSFAKEEVSGPQTRERNLKIKFSHQVDQKMNRKVADDTIYGTRQAQLGKDKKEETYVIGKIKDIYNYDEYVRFKKRYDKNKESFLMYHHDPQTFEKLEEILAQYPEYIEDEKGKKKKVSPFALYREENGPVTKYAKKNNGPVIKQLKYYDSKLNRKIDISHKYSTKNRQVVLQSLKPYRTDVYRNQDTGEYTLVGIDQNDGKFVNGHYGIPKSRYEEIKANNKLSEHDEFVFSLYKNSMVKVIDENGESIVVRYLSRSMPNRKNNAEIKPVEKYQFEDGEVVPVYGKCRKQMQTVFVKKGWTLLKGNTDILGNTYFVEKESENPKKMIDDK

SEQ ID NO: 389 - protein, 1419 aa, Chryseobacterium sp.
MMIKNILGLDLGTNSIGWALIKQNFENKYGEILGMGSRIIPMSQDVLGEFGKGNSVSQTAARTGYRGVRRLRERFLLRRERLHRVLNVLNFLPEHYASQIDFEKRFGKFKYETEPKLAYNNDGFFFKNSFDEMLGDFKDHQFHLLENGRKVPYDWTIYYLRKKALSQKIEKEELAWILLNFNQKRGYYQLRGEDFEEEKDRVFVRLKVDRVVDSGENIKGKILYDVYFENGWKYEKQIVKTEDWIGRTKEFIVTESILKNGDTKRTFKAVDSEKDWIAIKTKTEQEIDKSHKTVGAYIYEALLQNPKQKIKGKLVRTIERKFYREELKKILERQKEFHPELQSDDLYNDCIRELYRNNEAHQITLSKKDFVHLLLNDLIFYQRPLRSQKSSVSNCTLEFRKYKDENGVEHAQYLKTIPKSNPYYQEFRVWQWMFNLNIYRKDDDTNVTKEFLSSTEDYETLFEFLNNRKEVDQKALLRHFKLNEKTHRWNYVEDKKYPCNETKTMISTRLEKVENYPSDFLTREMEQNIWHIIYSVNDKIEYEKALKSFAHKNNLDENSFFEAFKKFPPFKSEYGSFSEKAIKKLLPLLRLGKYWNWESIDRKSQGRIEKIITGEFDGNIKDKVREKAIHLTAENDFQGLQLWLAQYIVYGRHSEASMIGKWNSADDLEEFLKGFKQHSLRNPIVEQVITETLRVVKDIWLKYGNGAKDFFSEIHIELGREMKQTKDERVDATKRITENENTNLRIKALLAEMMNDNSVENIRPYSPMQQEILKIYEDGILKSDIEIDDDILKISKTAQPSSSDLKRYKLWLEQRYKSPYTGQIIPLNKLFTSEYEIEHIIPQSRYFDDSFSNKIICESAVNKLKDNYIGLGFIKQFGGMIVECGFGKSVEIFKAEEYEDFVKKHYANNRSKRNKLLLEEIPEKMIDRQLNDTRHISKYISGVLSNIVRQEDGTDEGVNSKNIVPGNGKITTQLKQDWGLNDVWNELILPRFERMNQLTNSTDFTSWNKNHQKFLPTVPIEFSKGFSKKRIDHRHHAMDALVIACATKDHINLLNNQSAKSDTKRYDLKRKLMKFERVVYSHSKTGEKIEKEVPKQFLKPWDNFTVDAKNKMETIIVSFKQNLRVINKATNHYEKWIEKDGIKRKELIKQEGTNWAIRKPMHKETVSGKVDLPGIKIPKGKILTATRKSLDTSFDLKTINSITDTGIQKILKNYLEFKGSSELAFSPEGIEDMNKNIEKFNDGKPHQSINKVRIFELGSKFSVGQTGNKKDKYVEAAKGTNLFFAVYEDKNGKRSYETIPLNEVIERQKQGLDSVSFKNKEDFLLCPNDLVYVPSEDELENIYNIDFKNLTTEKTGNIYKVVSFSGNQIFFIRQDIAISIVNKAEFSTLNKMERAIDGSMIKENCIKLKIDRLGNIAKI

SEQ ID NO: 390 - protein, 1065 aa, Clostridium perfringens
MNKDINYALGLDIGITSVGWAVINLDLNRIEDLGVRIFNAAENPKDGSSLALPRRLARGRRRLLRRKAYRVERVRKLIVKNNILTKEELEGLFKNKEVIDVWEARVKGLDYKLSREEWAKILINFCKRRGFKSNRKNETKDKEAGQILSSISYNIEKMKETNSRTIGEYIYNEVKNSDDSYAPLRNKFGEYKMCVSRDVLREEIHTLFEKQRELGNNFASDEIEDKYFEIFNSQRPFSNFEDLEKLVGFCTFERKKHKRAPKHCISSEEFTLYEGINKLSIIKDGEKRKLSEEERTLVVNEAFNKKEIKYTTLRKLLGLSEDELFSTLTYSIDKDISKTENTKFVSLKGYHEIKRAIEKGVSKKAWQDIENNRNLLNDIAYVLTLGKTDDEIEKQLRLRNVPEELFESLLDMSFSKFNNLSIYALEKILPFMKEGYQYNEACEKAGYNFKAIYEGVRTKKLPVIEIDEIVNPVVNRALAQTRKVINSVIDKYGSPVRINIELARDLAKNFKDRKLIEKEQKENRANLDKIRENLRELMDKEPTAVEVLKYRLWEQQRGECAYTQSQIALERLFSPGYCEIDHIIPFSRSFDDSLSNKILVLGSENQRKGNKIPYEYFGEDSERWNSFEIWVKGSYLNYKKKANLLKKKFTEEEQRDWKARNLQDTKYICRYISNFVNNRLEFKESENKQKVITVNGRATAYLRSRWGLNKVREDGDKHHALDAAVVGVTTQGMVQKISKYSKAHELYTVRKNDEFVDVETGECVDVDEYKEIRKDILPRPWRGFSEELKLRLSDNPLEELKKLPIETYNEEFIKENVKPIFVSRVPFRKISGKLFKETIYSERAFKDGYFVSKKSLVDLKRGDLDNFYNYECDKKLYDAISERMKEFNYNGKKAFESPFRKPTKSGKEGPVVRSVKIKSAAPFKDGIPMNEGLVAKEGMVRIDIYEKEGKYFVVPVYRYQLAKGIVPKRAAIAGKSELKWPIMDQTYNFKFSIFKNDLIEIKYAKKDGYFGYYDGFDRHTASLVIENHDNSDRYRGIGVKTGVVEFNKYEVDVLGNYHKVNLGGN

SEQ ID NO: 391 - protein, 1099 aa, Corynebacterium accolens
MSLSYRVGIDVGTYSLGCTAIEVDDNDQPVNILSSVSLIHDSGLDPDQQKRAVTRLASSGVARRTRRLYRRRRRRMINLEKFLTSQGWETRPFEHYSDPYLPWNARVALVNGYISDDAQRGMYLSIAFRHIANHRGWRNPYWKVSSLYSPDKPSDAFEQIRKELEESTGHKIPETVTVGQLISFAQFGKDRLRGGGKKKDEKKPQEQVNQAVISARLHQIDHAREINEICRVQKIDDALRKQILDLVFAAESPKGAQIGRVGKDPLQPKLPRALKASDAFQQYRIVALAGNLRIYRDGVSTPLDRDEKLIVFNYLINLSHKEEPSWLKVAEVLNIDRGQLHGTATMTDDGERAGAAPPVHDTNRTILGCKIKPLVHWWEGANDDERAAMLKALSNSEVEDFDSPAGAQTQAFFANLDESEQEKLDSLHLPIGRAAYSEDTLMRLTSRMLDENLDLYEARLAEFDIPKDWAPPAPRIGEPVGNPAVDRVLKGVARWLEAAADEWGAPKSVVIEHVRDGFISKSKANEIDRANNARHKRNRELFKQMQENLGIDGKLRSSDLWRYQSVQRQNCQCAYCGSPITYTTCEMDHIVPRAGEGSTNTRDNLVATCHRCNLAKKNIPFAVWAAQTNIPGVSVKEALDRTRHWSEDSGMTSKDFKKFRKNVCDRLKRTVVDEPLDARSMESVAWMANELRGRVAQRFQEENTVVNVYRGELTAEARRAAGISDKLRFIDGTGKSRLDRRHHAVDAAVVAFTQNYVAETLAIRSNKKREAQLLQAAEQWKEFTGSDAEHRAAWNAWLPKMQKLAVLLQKALDEDRIAVTSNLRLRLGNGRAHEDSIGELKTIRVGDAISVTDIDRASSEALWCALTREPDFDENNGLPENPDRRIRIHGTWYDAEDDIEVFPVGAGAIKVRGGYAELSRFHHARIYKIPGKKAPVYCMLRVYNADLIRHRHEDLFSVEIKPQTMSVRQAEPKLRKALAENTAEYLGWLVTDDELVIDTSNFNTGQIAEMQSELGQVRRWRLDGFYSPSTLRLRPLQMSAEGLREDTSIGAKKIIDRPGWLPAINKLFGEGHVTVVRRDALGRARLTSNAHLPISWKAE

SEQ ID NO: 392 - protein, 1084 aa, Corynebacterium diphtheriae
MKYHVGIDVGTFSVGLAAIEVDDAGMPIKTLSLVSHIHDSGLDPDEIKSAVTRLASSGIARRTRRLYRRKRRRLQQLDKFIQRQGWPVIELEDYSDPLYPWKVRAELAASYIADEKERGEKLSVALRHIARHRGWRNPYAKVSSLYLPDGPSDAFKAIREEIKRASGQPVPETATVGQMVTLCELGTLKLRGEGGVLSARLQQSDHAREIQEICRMQEIGQELYRKIIDVVFAAESPKGSASSRVGKDPLQPGKNRALKASDAFQRYRIAALIGNLRVWVDGEKRILSVEEKNLVFDHLVNLTPKKEPEWVTIAEILGIDRGQLIGTATMTDDGERAGARPPTHDTNRSIVNSRIAPLVDWWKTASALEQHAMVKALSNAEVDDFDSPERAKVQAFFADLDDDVHAKLDSLHLPVGRAAYSEDTLVRLTRRMLSDGVDLYTARLQEFGIEPSWTPPTPRIGEPVGNPAVDRVLKTVSRWLESATKTWGAPERVIIEHVREGFVTEKRAREMDGDMRRRAARNAKLFQEMQEKLNVQGKPSRADLWRYQSVQRQNCQCAYCGSPITFSNSEMDHIVPRAGQGSTNTRENLVAVCHRCNQSKGNTPFAIWAKNTSIEGVSVKEAVERTRHWVTDTGMRSTDFKKFTKAVVERFQRATMDEEIDARSMESVAWMANELRSRVAQHFASHGTTVRVYRGSLTAEARRASGISGKLEFLDGVGKSRLDRRHHAIDAAVIAFTSDYVAETLAVRSNLKQSQAHRQEAPQWREFTGKDAEHRATWRVWCQKMEKLSALLTEDLRDDRVVVMSNVRLRLGNGSAHEETIGKLSKVKLGSQLSVSDIDKASSEALWCALTREPDFDPKDGLPANPERHIRVNGTHVYAGDNIGLFPVSAGSIALRGGYAELGSSFHHARVYKITSGKKPAFAMLRVYTIDLLPYRNQDLFSVELKPQTMSMRQAEKKLRDALATGNAEYLGWLVVDDELVVDTSKIATDQVKAVEAELGTIRRWRVDGFFGDTRLRLRPLQMSKEGIKKESAPELSKIIDRPGWLPAVNKLFSEGNVTVVRRDSLGRVRLESTAHLPVTWKVQ

SEQ ID NO: 393 - protein, 1084 aa, Corynebacterium diphtheriae
MKYHVGIDVGTFSVGLAAIEVDDAGMPIKTLSLVSHIHDSGLDPDEIKSAVTRLASSGIARRTRRLYRRKRRRLQQLDKFIQRQGWPVIELEDYSDPLYPWKVRAELAASYIADEKERGEKLSVALRHIARHRGWRNPYAKVSSLYLPDGPSDAFKAIREEIKRASGQPVPETATVGQMVTLCELGTLKLRGEGGVLSARLQQSDHAREIQEICRMQEIGQELYRKIIDVVFAAESPKGSASSRVGKDPLQPGKNRALKASDAFQRYRIAALIGNLRVRVDGEKRILSVEEKNLVFDHLVNLAPKKEPEWVTIAEILGIDRGQLIGTATMTDDGERAGARPPTHDTNRSIVNSRIAPLVDWWKTASALEQHAMVKALSNAEVDDFDSPEGAKVQAFFADLDDDVHAKLDSLHLPVGRAAYSEDTLVRLTRRMLADGVDLYTARLQEFGIEPSWTPPAPRIGEPVGNPAVDRVLKTVSRWLESATKTWGAPERVIIEHVREGFVTEKRAREMDGDMQRRAARNAKLFQEMQEKLNVQGKPSRADLWRYQSVQRQNCQCAYCGSPITFSNSEMDHIVPRAGQGSTNTRENLVAVCHRCNQSKGNTPFAIWAKNTSIEGVSVKEAVERTRHWVTDTGMRSPDFKKFTKAVVERFQRATMDEEIDARSMESVAWMANELRSRVAQHFASHGTTVRVYRGSLTAEARRASGISGKLKFFDGVGKSRLDRRHHAIDAAVIAFTSDYVAETLAVRSNLKQSQAHRQEAPQWREFTGKDAEHRAAWRVWCQKMEKLSALLTEDLRDDRVVVMSNVRLRLGNGSAHKETIGKLSKVKLGSQLSVSDIDKASSEALWCALTREPDFDPKEGLPANPERHIRVNGTHVYAGDNIGLFPVSAGSIALRGGYAELGSSFHHARVYKITSGKKPAFAMLRVYTIDLLPYRNQDLFSVELKPQTMSMRQAEKKLRDALATGNAEYLGWLVVDDELVVDTSKIATDQVKAVEAELGTIRRWRVDGFFSPSKLRLRPLQMSKEGIKKESAPELSKIIDRPGWLPAVNKLFSDGNVTVVRRDSLGRVRLESTAHLPVTWKVQ

SEQ ID NO: 394 - protein, 1084 aa, Corynebacterium diphtheriae
MKYHVGIDVGTFSVGLAAIEVDDAGMPIKTLSLVSHIHDSGLDPDKIKSAVTRLASSGIARRTRRLYRRKRRRLQQLDKFIQRQGWPVIELEDYSDPLYPWKVRAELAASYIADEKERGEKLSVALRHIARHRGWRNPYAKVSSLYLPDEPSDAFKAIREEIKRASGQPVPETATVGQMVTLCELGTLKLRGEGGVLSARLQQSDHAREIQEICRMQEIGQELYRKIIDVVFAAESPKGSASSRVGKDPLQPGKNRALKASDAFQRYRIAALIGNLRVRVDGEKRILSVEEKNLVFDHLVNLAPKKEPEWVTIAEILGIDRGQLIGTATMTDDGERAGARPPTHDTNRSIVNSRIAPLVDWWKTASALEQHAMVKALSNAEVDDFDSPEGAKVQAFFADLDDDVHAKLDSLHLPVGRAAYSEDTLVRLTRRMLADGVDLYTARLQEFGIEPSWTPPAPRIGEPVGNPAVDRVLKTVSRWLKSATKTWGAPERVIIEHVREGFVTEKRAREMDGDMRRRAARNAKLFQEMQEKLNVQGKPSRADLWRYQSVQRQNCQCAYCGSPITFSNSEMDHIVPRAGQGSTNTRENLVAVCHRCNQSKGNTPFAIWAKNTSIEGVSVKEAVERTRHWVTDTGMRSTDFKKFTKAVVERFQRATMDEEIDARSMESVAWMANELRSRVAQHFASHGTTVRVYRGSLTAEARRASGISGKLEFLDGVGKSRLDRRHHAIDAAVIAFTSDYVAETLAVRSNLKQSQAHRQEAPQWREFTGKDAEHRAAWRVWCQKMEKLSALLTEDLRDDRVVVMSNVRLRLGNGSAHEETIGKLSKVKLGSQLSVSDIDKASSEALWCALTREPDFDPKDGLPANPERHIRVNGTHVYAGDNIGLFPVSAGSIALRGGYAELGSSFHHARVYKITSGKKPAFAMLRVYTIDLLPYRNQDLFSVELKPQTMSMRQAEKKLRDALATGNAEYLGWLVVDDELVVDTSKIATDQVKAVEAELGTIRRWRVDGFFGDTRLRLRPLQMSKEGIKKESAPELSKIIDRPGWLPAVNKLFSEGNVTVVRRDSLGRVRLESTAHLPVTWKVQ

SEQ ID NO: 395 - protein, 1084 aa, Corynebacterium diphtheriae
MKYHVGIDVGTFSVGLAAIEVDDAGMPIKTLSLVSHIHDSGLDPDKIKSAVTRLASSGIARRTRRLYRRKRRRLQQLDKFIQRQGWPVIELEDYSDPLYPWKVRAELAASYIADEKERGEKLSVALRHIARHRGWRNPYAKVSSLYLPDEPSDAFKAIREEIKRASGQPVPETATVGQMVTLCELGTLKLRGEGGVLSARLQQSDHAREIQEICRMQEIGQELYRKIIDVVFAAESPKGSASSRVGKDPLQPGKNRALKASDAFQRYRIAALIGNLRVRVDGEKRILSVEEKNLVFDHLVNLAPKKEPEWVTIAEILGIDRGQLIGTATMTDDGERAGARPPTHDTNRSIVNSRIAPLVDWWKTASALEQHAMVKALSNAEVDDFDSPEGAKVQAFFADLDDDVHAKLDSLHLPVGRAAYSEDTLVRLTRRMLADGVDLYTARLQEFGIEPSWTPPAPRIGEPVGNPAVDRVLKTVSRWLESATKTWGAPERVIIEHVREGFVTEKRAREMDGDMRRRAARNAKLFQEMQEKLNVQGKPSRADLWRYQSVQRQNCQCAYCGSPITFSNSEMDHIVPRAGQGSTNTRENLVAVCHRCNQSKGNTPFAIWAKNTSIEGVSVKEAVERTRHWVTDTGMRSTDFKKFTKAVVERFQRATMDEEIDARSMESVAWMANELRSRVAQHFASHGTTVRVYRGSLTAEARRASGISGKLEFLDGVGKSRLDRRHHAIDAAVIAFTSDYVAETLAVRSNLKQSQAHRQEAPQWREFTGKDAEHRAAWRVWCQKMEKLSALLTEDLRDDRVVVMSNVRLRLGNGSAHEETIGKLSKVKLGSQLSVSDIDKASSEALWCALTREPDFDPKDGLPANPERHIRVNGTHVYAGDNIGLFPVSAGSIALRGGYAELGSSFHHARVYKITSGKKPAFAMLRVYTIDLLPYRNQDLFSVELKPQTMSMRQAEKKLRDALATGNAEYLGWLVVDDELVVDTSKIATDQVKAVEAELGTIRRWRVDGFFGDTRLRLRPLQMSKEGIKKESAPELSKIIDRPGWLPAVNKLFSEGNVTVVRRDSLGRVRLESTAHLPVTWKVQ

SEQ ID NO: 396 - protein, 1084 aa, Corynebacterium diphtheriae
MKYHVGIDVGTFSVGLAAIEVDDAGMPIKTLSLVSHIHDSGLDPDKMKSAVTRLASSGIARRTRRLYRRKRRRLQQLDKFIQRQGWPVIELEDYSDPLYPWKVRAELAASYIADEKERGEKLSVALRHIARHRGWRNPYAKVSSLYLPDEPSDAFKSIREEIKRASGQPVPETATVGQMVTLCELGTLKLRGEGGVLSARLQQSDHAREIQEICRMQEIGQELYRKIIDVVFAAESPKGSASSRVGKDPLQPGKNRALKASDSFQRYRIAALISNLRVRVDGEKRILSVEEKNLVFDHLVNLAPKKEPEWVTIAEILGIDRGQLIGTATMTDDGERAGARPPTHDTNRSIVNSRIAPLVDWWKTASALEQHAMVKALSNAEVDDFDSPEGAKVQAFFADLDDDVHAKLDSLHLPVGRAAYSEDTLVRLTRRMLADGVDLYTARLQEFGIEPSWTPPAPRIGEPVGNPAVDRVLKTVSRWLESATKTWGAPERVIIEHVRDGFVTEKRAREMDGDMRRRAARNAKLFQEMQEKLNVQGKPSRADLWRYQSVQRQNCQCAYCGSPITFSNSEMDHIVPRAGQGSTNTRENLVAVCHRCNQSKGNTPFAIWAKNTSIEGVSVKEAVERTRHWVTDTGMRSTDFKKFTKAVVERFQRATMDEEIDARSMESVAWMANELRSRVAQHFASHGTTVRVYRGSLTAEARRASGISGKLEFLDGVGKSRLDRRHHAIDAAVIAFTSDYVAETLAVRSNLKQSQAHRQEAPQWREFTGKDAEHRAAWRVWCQKMEKLSALLTEDLRDDRVVVMSNVRLRLGNGSAHEETIGKLSKVKLGSQLSVSDIDKASSEALWCALTREPDFDPKDGLPANPERHIRVNGTHVYAGDNIGLFPVSAGSIALRGGYAELGSSFHHARVYKITSGKKPAFAMLRVYTIDLLPYRNQDLFSVELKPQTMSMRQAEKKLRDALATGNAEYLGWLVVDDELVVDTSKIATDQVKAVEAELGTIRRWRVDGFFGDTRLRLRPLQMSKEGIKKELAPELSKIIDRPGWLPAVNKLFSEGNVTVVRRDSLGRVRLESTAHLPVTWKVQ

SEQ ID NO: 397 - protein, 1084 aa, Corynebacterium diphtheriae
MKYHVGIDVGTFSVGLAAIEVDDAGMPIKTLSLVSHIHDSGLDPDKMKSAVTRLASSGIARRTRRLYRRKRRRLQQLDKFIQRQGWPVIELEDYSDPLYPWKVRAELAASYIADEKERGEKLSVALRHIARHRGWRNPYAKVSSLYLPDEPSDAFKSIREEIKRASGQPVPETATVGQMVTLCELGTLKLRGEGGVLSARLQQSDHAREIQEICRMQEIGQELYRKIIDVVFAAESPKGSASSRVGKDPLQPGKNRALKASDAFQRYRIAALIGNLRVRVDGEKRILSVEEKNLVFDHLVNLAPKKEPEWVTIAEILGIDRGQLIGTATMTDDGERAGARPPTHDTNRSIVNSRIAPLVDWWKTASALEQHAMVKALSNAEVDDFDSPEGAKVQAFFADLDDDVHAKLDSLHLPVGRAAYSEDTLVRLTRRMLADGVDLYTARLQEFGIEPSWTPPAPRIGEPVGNPAVDRVLKTVSRWLESATKTWGAPERVIIEHVREGFVTEKRAREMDGDMRRRAARNAKLFQEMQEKLNVQGKPSRADLWRYQSVQRQNCQCAYCGSPITFSNSEMDHIVPRAGQGSTNTRENLVAVCHRCNQSKGNTPFAIWAKNTSIEGVSVKEAVERTRHWVTDTGMRSTDFKKFTKAVVERFQRATMDEEIDARSMESVAWMANELRSRVAQHFASHGTTVRVYRGSLTAEARRASGISGKLEFLDGVGKSRLDRRHHAIDAAVIAFTSDYVAETLAVRSNLKQSQAHRQEAPQWREFTGKDAEHRAAWRVWCQKMEKLSALLTEDLRDDRVVVMSNVRLRLGNGSAHEETIGKLSKVKLGSQLSVSDIDKASSEALWCALTREPDFDPKDGLPANPERHIRVNGTHVYAGDNIGLFPVSAGSIALRGGYAELGSSFHHARVYKITSGKKPAFAMLRVYTIDLLPYRNQDLFSVELKPQTMSMRQAEKKLRDALATGNAEYLGWLVVDDELVVDTSKIATDQVKAVEAELGTIRRWRVDGFFGDTRLRLRPLQMSKEGIKKESAPELSKIIDRPGWLPAVNKLFSEGNVTVVRRDSLGRVRLESTAHLPVTWKVQ

SEQ ID NO: 398 - protein, 1084 aa, Corynebacterium diphtheriae
MKYHVGIDVGTFSVGLAAIEVDDAGMPIKTLSLVSHIHDSRLDPDKIKSAVTRLASSGIARRTRRLYRRKRRRLQQLDKFIQRQGWPVIELEDYSDPLYPWKVRAELAASYIADEKERGEKLSVALRHIARHRGWRNPYAKVSSLYLPDEPSDAFKAIREEIKRASGQPVPETATVGQMVTLCELGTLKLRGEGGVLSARLQQSDHAREIQEICRMQEIGQELYRKIIDVVFAAESPKGSASSRVGKDPLQPGKNRALKASDAFQRYRIAALIGNLRVRVDGEKRILSVEEKNLVFDHLVNLAPKKEPEWVTIAEILGIDRGQLIGTATMTDDGERAGARPPTHDTNRSIVNSRIAPLVDWWKTASALEQHAMVKALSNAEVDDFDSPEGAKVQAFFADLDDDVHAKLDSLHLPVGRAAYSEDTLVRLTRRMLADGVDLYTARLQEFGIEPSWTPPAPRIGEPVGNPAVDRVLKTVSRWLESATKTWGAPERVIIEHVREGFVTEKRAREMDGDMRRRAARNAKLFQEMQEKLNIQGKPSRADLWRYQSVQRQNCQCAYCGSPITFSNSEMDHIVPRAGQGSTNTRENLVAVCHRCNQSKGNTPFAIWAKNTSIEGVSVKEAVERTRHWVTDTGMRSTDFKKFTKAVVERFQRVTMDEEIDARSMESVAWMANELRSRVAQHFASRGTTVRVYRGSLTAEARRASGISGKLEFLDGVGKSRLDRRHHAIDAAVIAFTSDYVAETLAVRSNLKQSQAHRQEAPQWREFTGKDAEHRAAWRVWCQKMEKLSALLTEDLRDDRVVVMSNVRLRLGNGSAHEETIGKLSKVKLGSQLSVSDIDKASSEALWCALTREPDFDPKDGLPANPERHIRVNGTHVYAGDNIGLFPVSAGSIALRGGYAELGSSFHHARVYKITSGKKPAFAMLRVYTIDLLPYRNQDLFSVELKPQTMSMRQAEKKLRDALATGNAEYLGWLVVDDELVVDTSKIATDQVKAVEAELGTIRRWRVDGFFGDTRLRLRPLQMSKEGIKKESAPELSKIIDRPGWLPAVNKLFSEGNVTVVRRDSLGRVRLESTAHLPVTWKVQ

SEQ ID NO: 399 - protein, 1069 aa, Corynebacterium matruchotii
MAAIAIDDDGKPTEILSAISLIHDSGVDPDSAKSAATRLATSGIARRTRRLYRRKRKRLAKLDKFISSQGWPLKEFEKYEDPFYPWRVRAELATTAITDQQELGEKLSIALRHIARHRGWRNPYSKVTALYTVTEPSDAFLAMQEECAKQLGRTIPETITVGQLVTGMNLGKTRLRGENSLLAARPRQSDNANEIHTIAKVQGLSNELVRQIIDHVFAAESPKGSAAEQVGKDPLQPTKKRALKASDAFQQYRIAALIGNLRIRGGKGNRRLTTEETRLVFDYLRSLPAKQEPTWQLVAEQLKIDRGNLVGTAIMTDDGERAGAKPPVHDTNRIMENTKIKPLATWWKSADADARAAMVKALSNAEVDDFDSQAGAQVQEFFFGISDEDQEKLDGLHLPIGRAAYSEDTLDRLTKRMIGEGMDLYEARQAEFKISNDWAPPAPEIGERVGNPAVDRVLKATARWLNAAERQWGAPKSVNIEHVRAAFMSESSARELDRDNQQRAKRNVKVVAEMQEKLGIEGRPSRADVWRFQSIQRQNGKCAYCGAEISFKNSEMDHIIPQVGEGSTNTRDNLVAVCRECNSSKSNIAFAVWAENTSRPGVSVQKAIERTHHWVTDSGLRKPEFDKFRKQVCDRLRRKATDEPIDARSLESVAWMANELRSRIAQKFKDGDTKVRVYKGALTAEARRASGISGKLEFVDGKGKSRLDRRHHAVDAAVVAFTSNYVAETLALRSNMKFDQELRRKAPQWREFTGSDHVHQVEWTKWKYRMQALAELLNNALVQDRIVVMHNLRLRLGNGAAHEDTIGKLTRLKVGDAISTTDIDRASSEALWCALTRDPDYDPKTGLPENPNRTIRIHGTHLTASDEITVFPVAAASIPIRDGFAKLGSNYHHVRLFRVPSGKKYKYCLMQVYTVDLLKFRKEDLFTVELKPQTISVRTCEALLRKALANGTAEYLGWLVSDDELLIDTSSFDTPGIVKLREEYGPVNRWRLAGLTSVTRLNLRPLYLSKEGLKPNVNPEIKKIIDNRSWIITVNKLFSSGHVKIIRRDALGRPRLHSAAHLPICWEVK

SEQ ID NO: 400 - protein, 210 aa, Diplosphaera colitermitum
MSDILDKPIVLSLNRAWQVIGHRTVKQALVALNGGNADLPPALGLDIAYPKFDDGAWNFDRPLFLNPLPWSEWIELPVRDFDFAITTPRLRIRVPTVIVATQFAKMPVRIPRLTREAIFERDGGVCQYTGEHVGKHGGNLDHVVPRDRGGRDSFENLVWAKREINSLKANRLPHEAGLRLLRRPKAPAPLPASMTIREARHPDWRHFLTP

SEQ ID NO: 401 - protein, 1332 aa, Dolosigranulum pigrum
MQKNYTIGLDIGTNSVGWAVMKDDYTLIRKRMKVLGNTDIKKIKKNFWGVRLFDEGETAKETRLKRGTRRRYQRRRNRLIYLQDIFQQPMLAIDENFFHRLDDSFFVPDDKSYDRHPIFGSLEEEVAYHNTYPTIYHLRKHLADNPEKADLRLVYTALAHIVKYRGHFLIEGELNTENTSISETFEQFLDTYSDIFKEQLVGDISKVEEILSSKQSRSRKHEQIMALFPNENKLGNFGRFMMLIVGNTSNFKPVFDLDDEYKLKLSDETYEEDLDTLLGMTDDVFLDVFMAAKNVYDAVEMSAIISTDTGNSKAVLSNQMINFYDEHKVDLAQLKQFFKTHLPDKYYECFSDPSKNGYAGYIDGKTNQEDFYKYIEKVMKTIKSDKKDYFLDKIDREVFLRKQRSFYNSVIPHQIHLQEMQAILDRQSQYYPFLAENRDKIESLVTFRIPYYVGPLTVSDQSEFAWMERQSDEPIRPWNFDEIVNKERSAEKFIERMTNMDTYLLEEKVLPKRSLLYQTFEVYNELTKVRYTNEQGKTEKLNRQQKAEIIETLFKQKNRVREKDIANYLEQYGYVDGTDIKGVEDKFNASLSTYNDLAKIDGAKAYLDDPEYADVWEDIIKILTIFEDKAMRKKQLQTYSDTLSPEILKKLERKHYTGWGRFSKKLINGLRDEGSNKTILDYLKSDEGSSGPTNRNFMQLIRDNTLSFKKKIEDAQTIEDTTHIYDTVAELPGSPAIKKGIRQALKIVEEIIDIIGYEPENIVVEMARESQTTKKGKDLSKERLEKLTEAIKEFDGPSDVKVKDLKNENLRNDRLYLYYLQNGRDMYTNEPLDINNLSKYDIDHIIPQSFTTDNSIDNKVLVSRTKNQGNKSDDVPSINIVHKMKPFWRQLHKAGLISDRKFKNLTKAEHGGLTEADRAHFLNRQLVETRQITKHVANLLDSQYNTAEEQRINIVLLKSSMTSRFRKEFKLYKVREINDYHHGHDAYLNAVVATTIMKVYPNLKPQFVYGQYKKTSMFKEEKATARKHFYSNITKFFKKEKVVNEETGEILWDTERHLSTIKRVLSWKQMNIVKKVEKQKGQLWKETIYPKGDSSKLIPVKEGMDPQKYGGLSQVSEAFAVVITHEKGKKKQLKSDLISIPIVDQKAYEQHPTAYLEEAGYNNPTVLHELFKYQLFELEDGSRRMIASAKEFQKGNQMVLPLELVELLYHANRYDKVKFPDSIEYVHDNLAKFDDLLEYVIDFSNKYINADKNVQKIQKIYKEHGTEDVELTVESFVNLMTFTAMGAPATFKFYGESITRSRYTSITEFRGSTLIFQSITGLYETRYKLEDN

SEQ ID NO: 402 - protein, 921 aa, Enterococcus faecalis
MIPHQIHLAELQAIIHRQAAYYPFLKENQEKIEQLVTFRIPYYVGPLSKGDASTFAWLKRQSEEPIRPWNLQETVDLDQSATAFIERMTNFDTYLPSEKVLPKHSLLYEKFMVFNELTKISYTDDRGIKANFSGKEKEKIFDYLFKTRRKVKKKDIIQFYRNEYNTEIVTLSGLEEDQFNASFSTYQDLLKCGLTRAELDHPDNAEKLEDIIKILTIFEDRQRIRTQLSTFKGQFSAEVLKKLERKHYTGWGRLSKKLINGIYDKESGKTILGYLIKDDGVSKHYNRNFMQLINDSQLSFKNAIQKAQSSEHEETLSETVNELAGSPAIKKGIYQSLKIVDELVAIMGYAPKRIVVEMARENQTTSTGKRRSIQRLKIVEKAMAEIGSNLLKEQPTTNEQLRDTRLFLYYMQNGKDMYTGDELSLHRLSHYDIDHIIPQSFMKDDSLDNLVLVGSTENRGKSDDVPSKEVVKDMKAYWEKLYAAGLISQRKFQRLTKGEQGGLTLEDKAHFIQRQLVETRQITKNVAGILDQRYNANSKEKKVQIITLKASLTSQFRSIFGLYKVREVNDYHHGQDAYLNCVVATTLLKVYPNLAPEFVYGEYPKFQTFKENKATAKAIIYTNLLRFFTEDEPRFTKDGEILWSNSYLKTIKKELNYHQMNIVKKVEVQKGGFSKESIKPKGPSNKLIPVKNGLDPQKYGGFDSPIVAYTVLFTHEKGKKPLIKQEILGITIMEKTRFEQNRILFLEEKGFLRPRVLMKLPKYTLYEFPEGRRRLLASAKEAQKGNQMVLPEHLLTLLYHAKQCLLPNQSESLTYVEQHQPEFQEILERVVDFAEVHTLAKSKVQQIVKLFEANQTADVKEIAASFIQLMQFNAMGAPSTFKFFQKDIERARYTSIKEIFDATIIYQSTTGLYETRRKVVD

SEQ ID NO: 403 - protein, 1337 aa, Enterococcus faecalis; identical to SEQ ID NO: 115

SEQ ID NO: 404 - protein, 1337 aa, Enterococcus faecalis
MKKDYVIGLDIGTNSVGWAVMTEDYQLVKKKMPIYGNTEKKKIKKNFWGVRLFEEGHTAEDRRLKRTARRRISRRRNRLRYLQAFFEEAMTALDENFFARLQESFLVPEDKKWHRHPIFAKLEDEVAYHETYPTIYHLRKKLADSSEQADLRLIYLALAHIVKYRGHFLIEGKLSTENISVKEQFQQFMIIYNQTFVNGESRLVSAPLPESVLIEEELTEKASRTKKSEKVLQQFPQEKANGLFGQFLKLMVGNKADFKKVFGLEEEAKITYASESYEEDLEGILAKVGDEYSDVFLAAKNVYDAVELSTILADSDKKSHAKLSSSMIVRFTEHQEDLKNFKRFIRENCPDEYDNLFKNEQKDGYAGYITHAGKVSQLKFYQYVKKIIQDIAGAEYFLEKIAQENFLRKQRTFDNGVIPHQIHLAELQAIIHRQAAYYPFLKENQEKIEQLVTFRIPYYVGPLSKGDANTFAWLKRQSEEPIRPWNLQETVDLDQSATAFIERMTNFDTYLPSEKVLPKHSLLYEKFMVFNELTKISYTDDRGIKANFSGKEKEKIFDYLFKTRRKVKKKDIIQFYRNEYNTEIVTLSGLEEDQFNASFSTYQDLLKCGLTRAELDHPDNAEKLEDIIKILTIFEDRQRIRTQLSTFKGQFSAEVLKKLERKHYTGWGRLSKKLINGIYDKESGKTILDYLIKDDGVSKHYNRNFMQLINDSQLSFKNAIQKAQSSEHEETLSETVNELAGSPAIKKGIYQSLKIVDELVAIMGYAPKRIVVEMARENQTTSTGKRRSIQRLKIVEKAMAEIGSNLLKEQPTTNEQLRDTRLFLYYMQNGKDMYTGDELSLHRLSHYDIDHIIPQSFMKDDSLDNLVLVGSTENRGKSDDVPSKEVVKDMKAYWEKLYAAGLISQRKFQRLTKGEQGGLTLEDKAHFIQRQLVETRQITKNVAGILDQRYNAKSKEKKVQIITLKASLTSQFRSIFGLYKVREVNDYHHGQDAYLNCVVATTLLKVYPNLAPEFVYGEYPKFQTFKENKATAKAIIYTNLLRFFTEDEPRFTKDGEILWSNSYLKTIKKELNYHQMNIVKKVEVQKGGFSKESIKPKGPSNKLIPVKNGLDPQKYGGFDSPIVAYTVLFTHEKGKKPLIKQEILGITIMEKTRFEQNPILFLEEKGFLRPRVLMKLPKYTLYQFPEGRRRLLASAKEAQKGNQMVLPEHLLTLLYHAKQCLLPNQSESLAYVEQHQPEFQEILERVVDFAEVHTLAKSKVQQIVKLFEANQTADVKEIAASFIQLMQFNAMGAPSTFKFFQKDIERARYTSIKEIFDATIIYQSTTGLYETRRKVVD

SEQ ID NO: 405 - protein, 1337 aa, Enterococcus faecalis
MKKDYVIGLDIGTNSVGWAVMTEDYQLVKKKMPIYGNTEKKKIKKNFWGVRLFEEGHTAEDRRLKRTARRRISRRRNRLRYLQAFFEEAMTALDENFFARLQESFLVPEDKKWHRHPIFAKLEDEVAYHETYPTIYHLRKKLADSSEQADLRLIYLALAHIVKYRGHFLIEGKLSTENISVKEQFQQFMIIYNQTFVNGESRLVSTPLPESVLIEEELTEKASRTKKSEKVLQQFPQEKANGLFGQFLKLMVGNKADFKKVFGLEEEAKITYASESYEEDLEGILAKVGDEYSDVFLAAKNVYDAVELSTILADSDKKSHAKLSSSMIVRFTEHQEDLKNFKRFIRENCPDEYDNLFKNEQKDGYAGYITHAGKVSQLKFYQYVKKIIQDIAGAEYFLEKIAQENFLRKQRTFDNGVIPHQIHLAELQAIIHRQAAYYPFLKENQEKIEQLVTFRIPYYVGPLSKGDASTFAWLKRQSEEPIRPWNLQETVDLDQSATAFIERMTNFDTYLPSEKVLPKHSLLYEKFMVFNELTKISYTDDRGIKANFSGKEKEKIFDYLFKTRRKVKKKDIIQFYRNEYNTEIVTLSGLEEDQFNASFSTYQDLLKCGLTRAELDHPDNAEKLEDIIKILTIFEDRQRIRTQLSTFKGQFSAEVLKKLERKHYTGWGRLSKKLINGIYDKESGKTILDYLVKDDGVSKHYNRNFMQLINDSQLSFKNAIQKAQSSEHEETLSETVNELAGSPAIKKGIYQSLKIVDELVAIMGYAPKRIVVEMARENQTTSTGKRRSIQRLKIVEKAMAEIGSNLLKEQPTTNEQLRDTRLFLYYMQNGKDMYTGDELSLHRLSHYDIDHIIPQSFMKDDSLDNLVLVGSTENRGKSDDVPSKEVVKDMKAYWEKLYAAGLISQRKFQRLTKGEQGGLTLEDKAHFIQRQLVETRQITKNVAGILDQRYNAKSKEKKVQIITLKASLTSQFRSIFGLYKVREVNDYHHGQDAYLNCVVATTLLKVYPNLAPEFVYGEYPKFQTFKENKATAKAIIYTNLLRFFTEDEPRFTKDGEILWSNSYLKTIKKELNYHQMNIVKKVEVQKGGFSKESIKPKGPSNKLIPVKNGLDPQKYGGFDSPIVAYTVLFTHEKGKKPLIKQEILGITIMEKTRFEQNPILFLEEKGFLRPRVLMKLPKYTLYEFPEGRRRLLASAKEAQKGNQMVLPEHLLTLLYHAKQCLLPNQSESLAYVEQHQPEFQEILERVVDFAEVHTLAKSKVQQIVKLFEANQTADVKEIAASFIQLMQFNAMGAPSTFKFFQKDIERARYTSIKEIFDATIIYQSTTGLYETRRKVVD

SEQ ID NO: 406 - protein, 1337 aa, Enterococcus faecalis
MKKDYVIGLDIGTNSVGWAVMTEDYQLVKKKMPIYGNTEKKKIKKNFWGVRLFEEGHTAEDRRLKRTARRRISRRRNRLRYLQAFFEEAMTDLDENFFARLQESFLVPEDKKWHRHPIFAKLEDEVAYHETYPTIYHLRKKLADSSEQADLRLIYLALAHIVKYRGHFLIEGKLSTENISVKEQFQQFMIIYNQTFVNGESRLVSAPLPESVLIEEELTEKASRTKKSEKVLQQFPQEKANGLFGQFLKLMVGNKADFKKVFGLEEEAKITYASESYEEDLEGILAKVGDEYSDVFLAAKNVYDAVELSTILADSDKKSHAKLSSSMIVRFTEHQEDLKKFKRFIRENCPDEYDNLFKNEQKDGYAGYIAHAGKVSQLKFYQYVKKIIQDIAGAEYFLEKIAQENFLRKQRTFDNGVIPHQIHLAELQAIIHRQAAYYPFLKENQEKIEQLVTFRIPYYVGPLSKGDASTFAWLKRQSEEPIRPWNLQETVDLDQSATAFIERMTNFDTYLPSEKVLPKHSLLYEKFMVFNELTKISYTDDRGIKANFSGKEKEKIFDYLFKTRRKVKKKDIIQFYRNEYNTEIVTLSGLEEDQFNASFSTYQDLLKCGLTRAELDHPDNAEKLEDIIKILTIFEDRQRIRTQLSTFKGQFSAEVLKKLERKHYTGWGRLSKKLINGIYDKESGKTILGYLIKDDGVSKHYNRNFMQLINDSQLSFKNAIQKAQSSEHEETLSETVNELAGSPAIKKGIYQSLKIVDELVAIMGYAPKRIVVEMARENQTTSTGKRRSIQRLKIVEKAMAEIGSNLLKEQPTTNEQLRDTRLFLYYMQNGKDMYTGDELSLHRLSHYDIDHIIPQSFMKDDSLDNLVLVGSTENRGKSDDVPSKEVVKDMKAYWEKLYAAGLISQRKFQRLTKGEQGGLTLEDKAHFIQRQLVETRQITKNVAGILDQRYNANSKEKKVQIITLKASLTSQFRSIFGLYKVREVNDYHHGQDAYLNCVVATTLLKVYPNLAPEFVYGEYPKFQTFKENKATAKAIIYTNLLRFFTEDEPRFTKDGEILWSNSYLKTIKKELNYHQMNIVKKVEVQKGGFSKESIKPKGPSNKLIPVKNGLDPQKYGGFDSPIVAYTVLFTHEKGKKPLIKQEILGITIMEKTRFEQNPILFLEEKGFLRPRVLMKLPKYTLYEFPEGRRRLLASAKEAQKGNQMVLPEHLLTLLYHAKQCLLPNQSESLAYVEQHQPEFQEILERVVDFAEVHTLAKSKVQQIVKLFEANQTADVKEIAASFIQLMQFNAMGAPSTFKFFQKDIERARYTSIKEIFDATIIYQSTTGLYETRRKVVD

SEQ ID NO: 407 - protein, 936 aa, Enterococcus faecalis
MKKDYVIGLDIGTNSVGWAVMTEDYQLVKKKMPIYGNTEKKKIKKNFWGVRLFEEGHTAEDRRLKRTARRRISRRRNRLRYLQAFFEEAMTDLDENFFARLQESFLVPEDKKWHRHPIFAKLEDEVAYHETYPTIYHLRKKLADSSEQADLRLIYLALAHIVKYRGHFLIEGKLSTENISVKEQFQQFMIIYNQTFVNGESRLVSAPLPESVLIEEELTEKASRTKKSEKVLQQFPQEKANGLFGQFLKLMVGNKADFKKVFGLEEEAKITYASESYEEDLEGILAKVGDEYSDVFLAAKNVYDAVELSTILADSDKKSHAKLSSSMIVRFTEHQEDLKKFKRFIRENCPDEYDNLFKNEQKDGYAGYIAHAGKVSQLKFYQYVKKIIQDIAGAEYFLEKIAQENFLRKQRTFDNGVIPHQIHLAELQAIIHRQAAYYPFLKENQEKIEQLVTFRIPYYVGPLSKGDASTFAWLKRQSEEPIRPWNLQETVDLDQSATAFIERMTNFDTYLPSEKVLPKHSLLYEKFMVFNELTKISYTDDRGIKANFSGKEKEKIFDYLFKTRRKVKKKDIIQFYRNEYNTEIVTLSGLEEDQFNASFSTYQDLLKCGLTRAELDHPDNAEKLEDIIKILTIFEDRQRIRTQLSTFKGQFSAEVLKKLERKHYTGWGRLSKKLINGIYDKESGKTILGYLIKDDGVSKHYNRNFMQLINDSQLSFKNAIQKAQSSEHEETLSETVNELAGSPAIKKGIYQSLKIVDELVAIMGYAPKRIVVEMARENQTTSTGKRRSIQRLKIVEKAMAEIGSNLLKEQPTTNEQLRDTRLFLYYMQNGKDMYTGDELSLHRLSHYDIDHIIPQSFMKDDSLDNLVLVGSTENRGKSDDVPSKEVVKDMKAYWEKLYAAGLISQRKFQRLTKGEQGGLTLEDKAHFIQRQLVETR

SEQ ID NO: 408 - protein, 1337 aa, Enterococcus faecalis
MKKDYVIGLDIGTNSVGWAVMTEDYQLVKKKMPIYGNTEKKKIKKNFWGVRLFEEGHTAEDRRLKRTARRRISRRRNRLRYLQAFFEEAMTDLDENFFARLQESFLVPEDKKWHRHPIFAKLEDEVAYHETYPTIYHLRKKLADSSEQADLRLIYLALAHIVKYRGHFLIEGKLSTENISVKEQFQQFMIIYNQTFVNGESRLVSAPLPESVLIEEELTEKASRTKKSEKVLQQFPQEKANGLFGQFLKLMVGNKADFKKVFGLEEEAKITYASESYEEDLEGILAKVGDEYSDVFLAAKNVYDAVELSTILADSDKKSHAKLSSSMIVRFTEHQEDLKKFKRFIRENCPDEYDNLFKNEQKDGYAGYIAHAGKVSQLKFYQYVKKIIQDIAGAEYFLEKIAQENFLRKQRTFDNGVIPHQIHLAELQAIIHRQAAYYPFLKENQEKIEQLVTFRIPYYVGPLSKGDASTFAWLKRQSEEPIRPWNLQETVDLDQSATAFIERMTNFDTYLPSEKVLPKHSLLYEKFMVFNELTKISYTDDRGIKANFSGKEKEKIFDYLFKTRRKVKKKDIIQFYRNEYNTEIVTLSGLEEDQFNASFSTYQDLLKCGLTRAELDHPDNAEKLEDIIKILTIFEDRQRIRTQLSTFKGQFSAEVLKKLERKHYTGWGRLSKKLINGIYDKESGKTILDYLVKDDGVSKHYNRNFMQLINDSQLSFKNAIQKAQSSEHEETLSETVNELAGSPAIKKGIYQSLKIVDELVAIMGYAPKRIVVEMARENQTTSTGKRRSIQRLKIVEKAMAEIGSNLLKEQPTTNEQLRDTRLFLYYMQNGKDMYTGDELSLHRLSHYDIDHIIPQSFMKDDSLDNLVLVGSTENRGKSDDVPSKEVVKDMKAYWEKLYAAGLISQRKFQRLTKGEQGGLTLEDKAHFIQRQLVETRQITKNVAGILNQRYNANSKEKKVQIITLKASLTSQFRSIFGLYKVREVNDYHHGQDAYLNCVVATTLLKVYPNLAPEFVYGEYPKFQTFKENKATAKAIIYTNLLRFFTEDEPRFTKDGEILWSNSYLKTIKKELNYHQMNIVKKVEVQKGGFSKESIKPKGPSNKLIPVKNGLDPQKYGGFDSPVVAYTVLFTHEKGKKPLIKQEILGITIMEKTRFEQNPILFLEEKGFLRPRVLMKLPKYTLYEFPEGRRRLLASAKEAQKGNQMVLPEHLLTLLYHAKQCLLPNQSESLAYVEQHQPEFQEILERVVDFAEVHTLAKSKVQQIVKLFEANQTADVKEIAASFIQLMQFNAMGAPSTFKFFQKDIERARYTSIKEIFDATIIYQSTTGLYETRRKVVD

SEQ ID NO: 409 - protein, 1337 aa, Enterococcus faecalis
MKKDYVIGLDIGTNSVGWAVMTEDYQLVKKKMPIYGNTEKKKIKKNFWGVRLFEEGHTAEDRRLKRTARRRISRRRNRLRYLQAFFEEAMTDLDENFFARLQESFLVPEDKKWHRHPIFAKLEDEVAYHETYPTIYHLRKKLADSSEQADLRLIYLALAHIVKYRGHFLIEGKLSTENISVKEQFQQFMIIYNQTFVNGESRLVSAPLPESVLIEEELTEKASRTKKSEKVLQQFPQEKANGLFGQFLKLMVGNKADFKKVFGLEEEAKITYASESYEEDLEGILAKVGDEYSDVFLAAKNVYDAVELSTILADSDKKSHAKLSSSMIVRFTEHQEDLKKFKRFIRENCPDEYDNLFKNEQKDGYAGYIAHAGKVSQLKFYQYVKKIIQDIAGAEYFLEKIAQENFLRKQRTFDNGVIPHQIHLAELQAIIHRQAAYYPFLKENQEKIEQLVTFRIPYYVGPLSKGDASTFAWLKRQSEEPIRPWNLQETVDLDQSATAFIERMTNFDTYLPSEKVLPKHSLLYEKFMVFNELTKISYTDDRGIKANFSGKEKEKIFDYLFKTRRKVKKKDIIQFYRNEYNTEIVTLSGLEEDQFNASFSTYQDLLKCGLTRAELDHPDNAEKLEDIIKILTIFEDRQRIRTQLSTFKGQFSAEVLKKLERKHYTGWGRLSKKLINGIYDKESGKTILGYLIKDDGVSKHYNRNFMQLINDSQLSFKNAIQKAQSSEHEETLSETVNELAGSPAIKKGIYQSLKIVDELVAIMGYAPKRIVVEMARENQTTSTGKRRSIQRLKIVEKAMAEIGSNLLKEQPTTNEQLRDTRLFLYYMQNGKDMYTGDELSLHRLSHYDIDHIIPQSFMKDDSLDNLVLVGSTENLGKSDDVPSKEVVKDMKAYWEKLYAAGLISQRKFQRLTKGEQGGLTLEDKAHFIQRQLVETRQITKNVAGILDQRYNANSKEKKVQIITLKASLTSQFRSIFGLYKVREVNDYHHGQDAYLNCVVATTLLKVYPNLAPEFVYGEYPKFQTFKENKATAKAIIYTNLLRFFTEDEPRFTKDGEILWSNSYLKTIKKELNYHQMNIVKKVEVQKGGFSKESIKPKGPSNKLIPVKNGLDPQKYGGFDSPIVAYTVLFTHEKGKKPLIKQEILGITIMEKTRFEQNPILFLEEKGFLRPRVLMKLPKYTLYEFPEGRRRLLASAKEAQKGNQMVLPEHLLTLLYHAKQCLLPNQSESLAYVEQHQPEFQEILERVVDFAEVHTLAKSKVQQIVKLFEANQTADVKEIAASFIQLMQFNAMGAPSTFKFFQKDIERARYTSIKEIFDATIIYQSTTGLYETRRKVVD

SEQ ID NO: 410 - protein, 1337 aa, Enterococcus faecalis
MKKDYVIGLDIGTNSVGWAVMTEDYQLVKKKMPIYGNTEKKKIKKNFWGVRLFEEGHTAEDRRLKRTARRRISRRRNRLRYLQAFFEEAMTDLDENFFARLQESFLVPEDKKWHRHPIFAKLEDEVAYHETYPTIYHLRKKLADSSEQADLRLIYLALAHIVKYRGHFLIEGKLSTENTSVKEQFQQFMVIYNQTFVNGESRLVSAPLPESVLIEEELTEKASRTKKSEKVLQQFPQEKANGLFGQFLKLMVGNKADFKKVFGLEEEAKITYASESYEEDLEGILAKVGDEYSDVFLAAKNVYDAVELSTILADSDKKSHAKLSSSMIVRFTEHQEDLKKFKRFIRENCPDEYDNLFKNEQKDGYAGYIAHAGKVSQLKFYQYVKKIIQDIAGAEYFLEKIAQENFLRKQRTFDNGVIPHQIHLAELQAIIHRQAAYYPFLKENQEKIEQLVTFRIPYYVGPLSKGDASTFAWLKRQSEEPIRPWNLQETVDLDQSATAFIERMTNFDTYLPSEKVLPKHSLLYEKFMVFNELTKISYTDDRGIKANFSGKEKEKIFDYLFKTRRKVKKKDIIQFYRNEYNTEIVTLSGLEEDQFNASFSTYQDLLKCGLTRAELDHPDNAEKLEDIIKILTIFEDRQRIRTQLSTFKGQFSAEVLKKLERKHYTGWGRLSKKLINGIYDKESGKTILDYLVKDDGVSKHYNRNFMQLINDSQLSFKNAIQKAQSSEHEETLSETVNELAGSPAIKKGIYQSLKIVDELVAIMGYAPKRIVVEMARENQTTSTGKRRSIQRLKIVEKAMAEIGSNLLKEQPTTNEQLRDTRLFLYYMQNGKDMYTGDELSLHRLSHYDIDHIIPQSFMKDDSLDNLVLVGSTENRGKSDDVPSKKVVKKMKAYWEKLYAAGLISQRKFQRLTKGEQGGLTLEDKAHFIQRQLVETRQITKNVAGILDQRYNAKSKEKKVQIITLKASLTSQFRSIFGLYKVREVNDYHHGQDAYLNCVVATTLLKVYPNLAPEFVYGEYPKFQAFKENKATAKTIIYTNLMRFFTEDEPRFTKDSEILWSNSYLKTIKKELNYHQMNIVKKVEVQKGGFSKESIKPKGPSNKLIPVKNGLDPQKYGGFDSPVVAYTVLFTHEKGKKPLIKQEILGITIMEKTRFEQNPILFLEEKGFLRPRVLMKLPKYTLYEFPEGRRRLLASAKEAQKGNQMVLPEHLLTLLYHAKQCLLPNQSESLAYVEQHQPEFQEILERVVDFAEVHTLAKSKVQQIVKLFEANQTADVKEIAASFIQLMQFNAMGAPSTFKFFQKDIERARYTSIKEIFDATIIYQSTTGLYETRRKVVD

SEQ ID NO: 411 - protein, 1150 aa, Enterococcus faecalis
MYSIGLDLGISSVGWSVIDERTGNVIDLGVRLFSAKNSEKNLERRTNRGGRRLIRRKTNRLKDAKKILAAVGFYEDKSLKNSCPYQLRVKGLTEPLSKGEIYKVTLHILKKRGISYLDEDDTEAAKESQDYKEQVRENAQLLTKYTPGQIQLQRLKENNRVKTGINAQGNYQLNVFKVSAYANELATILKTQQAFYPNELTDDWIALFVQPGIAEEAGLIYRKRPYYHGPGNEANNSPYGRWSDFKKTGQPATNIFDKLIGKDFQGELRASGLSLSAQQYNLLNDLTNLKIDGEIPLSPEQKEYILAELMTKEFTRFGVNDVVKLLGVKKERLSGWRLDKKGKPEIHTLKGYRNWRKIFAESGIDLAMLPTETIDCLAKILTLNTEREGIENTLAFELPELAESVKLLVLDRYKELSQSVSTQAWHRFSLKTLHLLIPELMNATSEQNTLLEQFQLKSDVRKRYSEYKKLPTKDVLTEIYNPTVNKTVSQAFKVIDALLVKYGKEQIRYITIEMPRDDNEEDEKKRIKELHAKNSQRKNDSQSYFMQKSGWSQEKFQTTIQKNRRFLAKLLYYYEQDGICAYTGLSISPELLVSDSTEIDHIIPISISLDDSINNKVLVLSKANQVKGQQTPYDAWMDGSFKKINGKFSNWDDYQKWVESRHFSHKKENNLLETRNIFDSEQVEKFLARNLNDTRYASRLVLNTLQSFFANQETKVRVVNGSFTHTLRKKWGADLDKTRETHHHHAVDATLCAVTPFVKVSRYHYAVKEETGEKVMREIDFETGEIVDEMSYREFKKSKKYERKTYQVKWPNFREQLKPVNLHPRIKFSHQVDRKANRKLSDATIYSVREKTEVKTLKSGKQKITTDEYTIGKIKDIYTVDGWEAFKKKQDKLLMKDLDEKTYERLLSIAETTPDFQEVEEKNGKVKRVKRSPFAVYCEENDIPAIRKYAKKNNGPLIRSLKYYDGKLNKHINITKDSQGRPVEKTKNGRKVTLQSLKPYRYDIYQDLETKAYYTVQLYYSDLRFVEGKYGITEKEYMKKVAEQTKGQVVRFCFSLQKNDGLEIEWKDSQRYDVRFYNFQSANSINFKGLEQEMMPAENQFKQKPYNNGAINLNIAKYGKEGKKLRKFNTDILGKKHYLYYEKEPKNIIK

SEQ ID NO: 412 - protein, 1150 aa, Enterococcus faecalis
MYSIGLDLGISSVGWSVIDERTGNVIDLGVRLFSAKNSEKNLERRTNRGGRRLIRRKTNRLKDAKKILAAVGFYEDKSLKNSCPYQLRVKGLTEPLSKGEIYKVTLHILKKRGISYLDEDDTEAAKESQDYKEQVRKNAQLLTKYTPGQIQLQRLKENNRVKTGINAQGNYQLNVFKVSAYANELATILKTQQAFYPNELTDDWIALFVQPGIAEEAGLIYRKRPYYHGPGNEANNSPYGRWSDFKKTGQPATNIFDRLIGKDFQGELRASGLSLSAQQYNLLNDLTNLKIDGEIPLSPEQKEYILAELMTKEFTRFGVNDVAKLLGVKKERLSGWRLDKKGKPEIHTLKGYRNWRKIFAESGIDLATLPTETIDCLAKVLTLNTEHEGIENTLAFELPELAESVKLLVLDRYKELSQSVSTQAWHRFSLKTLHLLIPELMNATSEQNTLLEQFQLKSDVRKRYSEYKKLPTKDVLTEIYNPTVNKTVSQAFKVIDALLVKYGKEQIRYITIEMPRDDNEEDEKKRIKELHAKNSQRKNDSQSYFMQKSGWSQEKFQTTIQKNRRFLAKLLYYYEQDGICAYTGLSISPELLVSDSTEIDHIIPISISLDDSINNKVLVLSKANQVKGQQTPYDAWMDGSFKKINGKFSNWDDYQKWVESRHFSHKKENNLLETRNIFDSEQVEKFLARNLNDTRYASRLVLNTLQSFFANHETKVRVVNGSFTHTLRKKWGADLDKTRETHHHHAVDATLCAVTPFVKVSRYHYAVKEETGEKVMREIDFETGEIVDEMSYQEFKKSKKYERKTYQVKWPNFREQLKPVNLHPRIKFSHQVDRKANRKLSDATIYSVREKTEVKTLKSGKQKITTDEYTIGKIKDIYTVDGWEAFKKKQDKLLMKDLDEKTYERLLSIAETTPDFQEVEEKNGKVKRVKRSPFAVYCEENDIPAIQKYAKKNNGPLIRSLKYYDGKLNKHINITKDSQGRPVEKTKNGRKVTLQSLKPYRYDIYQDLETKAYYTVQLYYSDLRFVEGKYGITEKEYMKKVAEQTKGQVVRFCFSLQKNDGLEIEWKDSQRYDVRFYNFQSANSINFKGLEQEMMPAENQFKQKPYNNGAINLNIAKYGKEGKKLRKFNTDILGKKHYLYYEKEPKNIIK

SEQ ID NO: 413 - protein, 1150 aa, Enterococcus faecalis
MYSIGLDLGISSVGWSVIDERTGNVIDLGVRLFSAKNSEKNLERRTNRGGRRLIRRKTNRLKDAKKILAAVGFYEDKSLKNSCPYQLRVKGLTEPLSKGEIYKVTLHILKKRGISYLDEDDTEAAKESQDYKEQVRKNAQLLTKYTPGQIQLQRLKENNRVKTGINVQGNYQLNVFKVSAYANELATILKTQQAFYPNELTDDWIALFVQPGIAEEAGLIYRKRPYYHGPGNEANNSPYGRWSDFQKTGEPATNIFDKLIGKDFQGELRASGLSLSAQQYNLLNDLTNLKIDGEVPLSSEQKEYILTELMTKEFTRFGVNDVVKLLGVKKERLSGWRLDKKGKPEIHTLKGYRNWRKIFAEAGIDLATLPTETIDCLAKVLTLNTEREGIENTLAFELPELSESVKLLVLDRYKELSQSISTQSWHRFSLKTLHLLIPELMNATSEQNTLLEQFQLKSDVRKRYSEYKKLPTKDVLAEIYNPTVNKTVSQAFKVIDALLVKYGKEQIRYITIEMPRDDNEEDEKKRIKELHAKNSQRKNDSQSYFMQKSGWSQEKFQTTIQKNRRFLAKLLYYYEQDGICAYTGLPISPELLVSDSTEIDHIIPISISLDDSINNKVLVLSKANQVKGQQTPYDAWMDGSFKKINGKFSNWDDYQKWVESRHFSHKKENNLLETRNIFDSEQVEKFLARNLNDTRYASRLVLNTLQSFFTNQETKVRVVNGSFTHTLRKKWGADLDKTRETHHHHAVDATLCAVTPFVKVSRYHYAVKEETGEKVMREIDFETGEIVNEMSYREFKKSKKYERKTYQVKWPNFREQLKPVNLHPRIKFSHQVDRKANRKLSDATIYSVREKTEVKTLKSGKQKITTDEYTIGKIKDIYTLDGWEAFKKKQDKLLMKDLDEKTYERLLSIAETTPDFQEVEEKNGKVKRVKRSPFAVYCEENDIPAIQKYAKKNNGPLIRSLKYYDGKLNKHINITKDSQGRPVEKTKNGRKVTLQSLKPYRYDIYQDLETKAYYTVQLYYSDLRFVEGKYGITEKEYMKKVAEQTKGQVVRFCFSLQKNDGLEIEWKDSQRYDVRFYNFQSANSINFKGLEQEIMPAENQFKQKPYNNGAINLNIAKYGKEGKKLRKFNTDILGKKHYLFYEKEPKNIIK

SEQ ID NO: 414 - protein, 1150 aa, Enterococcus faecalis; identical to SEQ ID NO: 183

SEQ ID NO: 415 - protein, 1150 aa, Enterococcus faecalis; identical to SEQ ID NO: 184

SEQ ID NO: 416 - protein, 1340 aa, Enterococcus faecium
MKKEYTIGLDIGTNSVGWSVLTDDYRLVSKKMKVAGNTEKSSTKKNFWGVRLFDEGQTAEARRSKRTARRRLARRRQRILELQKIFAPEILKIDEHFFARLNESFLVLDEKKQSRHPVFATIKQEKSYHQTYPTIYHLRQALADSSEKADIRLVYLAMAHLLKYRGHFLIEGELNTENSSVTETFRQFLSTYNQQFSEADDKQTEKLDEAVDCSFVFTEKMSKTKKAETLLKYFPHEKSNGYLSQFIKLMVGNQGNFKNVFGLEEEAKLQFSKETYEEDLEELLEKIGDDYIDLFVQAKNVYDAVLLSEILSDSTKNTRAKLSAGMIRRYDAHKEDLVLLKRFVKENLPKKYRAFFGDNSVNGYAGYIEGHATQEDFYKFVKKELTGIRGSEVFLTKIEQENFLRKQRTFDNGVIPHQIHLTELRAIIANQKKHYPFLKEEQEKLESLLTFKIPYYVGPLAKKQENSPFAWLIRKSEEKIKPWNLPEIVDMEGSAVRFIERMNNTDMYIPHNKVLPKNSLLYQKFSIYNELTKVRYQDERGQMNYFSSIEKKEIFHELFEKNRKVTKKDLQEFLYLKYDIKHAELSGIEKAFNASYTTYHDFLTMSENKREMKQWLEDPELASMFEEIIKTLTVFEDREMIKTRLSHHEATLGKHIIKKLTKKHYTGWGRLSKELIQGIRDKQSNKTILDYLINDDDFPHHRNRNFMQLINDDSLSFKKEIKKAQMITDTENLEEIVKELTGSPAIKKGILQSLKIVDEIVGIMGYEPANIVVEMARENQTTGRGLKSSRPRLKALEESLKDFGSQLLKEYPTDNSSLQKDRLYLYYLQNGRDMYTGAPLDIHRLSDYDIDHIIPRSFTTDNSIDNKVLVSSKENRLKKDDVPSEKVVKKMRSFWYDLYSSKLISKRKLDNLTKIKLTEEDKAGFIKRQLVETRQITKHVAGILHHRFNKAEDTNEPIRKVRIITLKSALVSQFRNRFGIYKVREINEYHHAHDAYLNGVVALALLKKYPQLAPEFVYGEYLKFNAHKANKATVKKEFYSNIMKFFESDTPVCDENGEIFWDKSKSIAQVKKVINHHHMNIVKKTEIQKGGFSKETVEPKKDSSKLLPRKNNWDPAKYGGLGSPNVAYTVAFTYEKGKARKRTNALEGITIMEREAFEQSPVLFLKNKGYEQAEIEMKLPKYALFELENGRKRMVASNKEAQKANSFLLPEHLVTLLYHAKQYDEISHKESFDYVNEHHKEFSEVFARVLEFAGKYTLAEKNIEKLEKIYKENQTDDLAKLASSFVNLMQFNAMGAPADFKFFDVTIPRKRYTSLTEIWQSTIIHQSITGLYETRIRMGK

SEQ ID NO: 417 - protein, 1339 aa, Enterococcus faecium
MKKEYTIGLDIGTNSVGWSVLTDDYRLVSKKMKVAGNTEKSSTKKNFWGVRLFDEGQTAEARRSKRTARRRLARRRQRILELQKIFAPEILKIDEHFFARLNESFLVLDEKKQSRHPVFATIKQEKSYHQTYPTIYHLRQALADSSEKADIRLVYLAMAHLLKYRGHFLIEGELNTENSSVTETFRQFLSTYNQQFSEADDKQTEKLDEAVDCSFVFTEKMSKTKKAETLLKYFPHEKSNGYLSQFIKLMVGNQGNFKNVFGLEEAKLQFSKETYEEDLEELLEKIGDDYIDLFVQAKNVYDAVLLSEILSDSTKNTRAKLSAGMIRRYDAHKEDLVLLKRFVKENLPKKYRAFFGDNSVNGYAGYIEGHATQEDFYKFVKKELTGIRGSEVFLTKIEQENFLRKQRTFDNGVIPHQIHLTELRAIIANQKKHYPFLKEEQEKLESLLTFKIPYYVGPLAKKQENSPFAWLIRKSEEKIKPWNLPEIVDMEGSAVRFIERMINTDMYMPHNKVLPKNSLLYQKFSIYNELTKVRYQDERGQMNYFSSIEKKEIFHELFEKNRKVTKKDLQEFLYLKYDIKHAELSGIEKAFNASYTTYHDFLTMSENKREMKQWLEDPELASMFEEIIKTLTVFEDREMIKTRLSHHEATLGKHIIKKLTKKHYTGWGRLSKELIQGIRDKQSNKTILDYLINDDDFPHHRNRNFMQLINDDSLSFKKEIKKAQMITDTENLEEIVKELTGSPAIKKGILQSLKIVDEIVGIMGYEPANIVVEMARENQTTGRGLKSSRPRLKALEESLKDFGSQLLKEYPTDNSSLQKDRLYLYYLQNGRDMYTGAPLDIHRLSDYDIDHIIPRSFTTDNSIDNKVLVSSKENRLKKDDVPSEKVVKKMRSFWYDLYSSKLISKRKLDNLTKIKLTEEDKAGFIKRQLVETRQITKHVAGILHHRFNKAEDTNEPIRKVRIITLKSALVSQFRNRFGIYKVREINEYHHAHDAYLNGVVALALLKKYPQLAPEFVYGEYLKFNAHKANKATVKKEFYSNIMKFFESDTPVCDENGEIFWDKSKSIAQVKKVINHHHMNIVKKTEIQKGGFSKETVEPKKDSSKLLPRKNNWDPAKYGGLGSPNVAYTVAFTYEKGKARKRTNALEGITIMEREAFEQSPVLFLKNKGYEQAEIEMKLPKYALFELENGRKRMVASNKEAQKANSFLLPEHLVTLLYHAKQYDEISHKESFDYVNEHHKEFSEVFARVLEFAGKYTLAEKNIEKLEKIYKENQTDDLAKLASSFVNLMQFNAMGAPADFKFFDVTIPRKRYTSLTEIWQSTIIHQSITGLYETRIRMGK

SEQ ID NO: 418 - protein, 1340 aa, Enterococcus faecium
MKKEYTIGLDIGTNSVGWSVLTDDYRLVSKKMKVAGNTEKSSTKKNFWGVRLFDEGQTAEARRSKRTARRRLARRRQRILELQKIFAPEILKIDEHFFARLNESFLVLDEKKQSRHPVFATIKQEKSYHQTYPTIYHLRQALADSSEKADIRLVYLAMAHLLKYRGHFLIEGELNTENSSVTETFRQFLSTYNQQFSEADDKQTEKLDEAVDCSFVFTEKMSKTKKAETLLKYFPHEKSNGYLSQFIKLMVGNQGNFKNVFGLEEEAKLQFSKETYEEDLEELLEKIGDDYIDLFVQAKNVYDAVLLSEILSDSTKNTRAKLSAGMIRRYDAHKEDLVLLKRFVKENLPKKYRAFFGDNSVNGYAGYIEGHATQEDFYKFVKKELTGIRGSEVFLTKIEQENFLRKQRTFDNGVIPHQIHLTELRAIIANQKKHYPFLKEEQEKLESLLTFKIPYYVGPLAKKQENSPFAWLIRKSEEKIKPWNLPEIVDMEGSAVRFIERMINTDMYIPHNKVLPKNSLLYQKFSIYNELTKVRYQDERGQMNYFSSIEKKEIFHELFEKNRKVTKKDLQEFLYLKYDIKHAELSGIEKAFNASYTTYHDFLTMSENKREMKQWLEDPELASMFEEIIKTLTVFEDREMIKTRLSHHEATLGKHIIKKLTKKHYTGWGRLSKELIQGIRDKQSNKTILDYLINDDDFPHHRNRNFMQLINDDSLSFKKEIKKAQMITDTENLEEIVKELTGSPAIKKGILQSLKIVDEIVGIMGYEPANIVVEMARENQTTGRGLKSSRPRLKALEESLKDFGSQLLKEYPTDNSSLQKDRLYLYYLQNGRDMYTGAPLDIHRLSDYDIDHIIPRSFTTDNSIDNKVLVSSKENRLKKDDVPSEKVVKKMRSFWYDLYSSKLISKRKLDNLTKIKLTEEDKAGFIKRQLVETRQITKHVAGILHHRFNKAEDTNEPIRKVRIITLKSALVSQFRNRFGIYKVREINEYHHAHDAYLNGVVALALLKKYPQLAPEFVYGEYLKFNAHKANKATVKKEFYSNIMKFFESDTPVCDENGEIFWDKSKSIAQVKKVINHHHMNIVKKTEIQKGGFSKETVEPKKDSSKLLPRKNNWDPAKYGGLGSPNVAYTVAFTYEKGKARKRTNALEGITIMEREAFEQSPVLFLKNKGYEQAEIEMKLPKYALFELENGRKRMVASNKEAQKANSFLLPEHLVTLLYHAKQYDEISHKESFDYVNEHHKEFSEVFARVLEFAGKYTLAEKNIEKLEKIYKENQTDDLAKLASSFVNLMQFNAMGAPADFKFFDVTIPRKRYTSLTEIWQSTIIHQSITGLYETRIRMGK

SEQ ID NO: 419 - protein, 1340 aa, Enterococcus faecium
MKKEYTIGLDIGTNSVGWSVLTDDYRLVSKKMKVAGNTEKSSTKKNFWGVRLFDEGQTAEARRSKRTARRRLARRRQRILELQKIFAPEILKIDEHFFARLNESFLVLDEKKQSRHPVFATIKQEKSYHQTYPTIYHLRQALADSSEKADIRLVYLAMAHLLKYRGHFLIEGELNTENSSVTETFRQFLSTYNQQFSEADDKQTEKLDEAVDCSFVFTEKMSKTKKAETLLKYFPHEKSNGYLSQFIKLMVGNQGNFKNVFGLEEEAKLQFSKETYEEDLEELLEKIGDDYIDLFVQAKNVYDAVLLSEILSDSTKNTRAKLSAGMIRRYDAHKEDLVLLKRFVKENLPKKYRAFFGDNSVNGYAGYIEGHATQEDFYKFVKKELTGIRGSEVFLTKIEQENFLRKQRTFDNGVIPHQIHLTELRAIIANQKKHYPFLKEEQEKLESLLTFKIPYYVGPLAKKQENSPFAWLIRKSEEKIKPWNLPEIVDMEGSAVRFIERMINTDMYMPHNKVLPKNSLLYQKFSIYNELTKVRYQDERGQMNYFSSIEKKEIFHELFEKNRKVTKKDLQEFLYLKYDIKHAELSGIEKAFNASYTTYHDFLTMSENKREMKQWLEDPELASMFEEIIKTLTVFEDREMIKTRLSHHEATLGKHIIKKLTKKHYTGWGRLSKELIQGIRDKQSNKTILDYLINDDDFPHHRNRNFMQLINDDSLSFKKEIKKAQMITDTENLEEIVKELTGSPAIKKGILQSLKIVDEIVGIMGYEPANIVVEMARENQTTGRGLKSSRPRLKALEESLKDFGSQLLKEYPTDNSSLQKDRLYLYYLQNGRDMYTGAPLDIHRLSDYDIDHIIPRSFTTDNSIDNKVLVSSKENRLKKDDVPSEKVVKKMRSFWYDLYSSKLISKRKLDNLTKIKLTEEDKAGFIKRQLVETRQITKHVAGILHHRFNKAEDTNEPIRKVRIITLKSALVSQFRNRFGIYKVREINEYHHAHDAYLNGVVALALLKKYPQLAPEFVYGEYLKFNAHKANKATVKKEFYSNIMKFFESDTPVCDENGEIFWDKSKSIAQVKKVINHHHMNIVKKTEIQKGGFSKETVEPKKDSSKLLPRKNNWDPAKYGGLGSPNVAYTVAFTYEKGKARKRTNALEGITIMEREAFEQSPVLFLKNKGYEQAEIEMKLPKYALFELENGRKRMVASNKEAQKANSFLLPEHLVTLLYHAKQYDEISHKESFDYVNEHHKEFSEVFARVLEFAGKYTLAEKNIEKLEKIYKENQTDDLAKLASSFVNLMQFNAMGAPADFKFFDVTIPRKRYTSLTEIWQSTIIHQSITGLYETRIRMGK

SEQ ID NO: 420 - protein, 1339 aa, Enterococcus faecium
MKKEYTIGLDIGTNSVGWSVLTDDYRLVSKKMKVAGNTEKSSTKKNFWGVRLFDEGQTAEARRSKRTARRRLARRRQRILELQKIFAPEILKIDEHFFARLNESFLVLDEKKQSRHPVFATIKQEKSYHQTYPTIYHLRQALADSSEKADIRLVYLAMAHLLKYRGHFLIEGELNTENSSVTETFRQFLSTYNQQFSEADDKQTEKLDEAVDCSFVFTEKMSKTKKAETLLKYFPHEKSNGYLSQFIKLMVGNQGNFKNVFGLEEAKLQFSKETYEEDLEELLEKIGDDYIDLFVQAKNVYDAVLLSEILSDSTKNTRAKLSAGMIRRYDAHKEDLVLLKRFVKENLPKKYRAFFGDNSVNGYAGYIEGHATQEDFYKFVKKELTGIRGSEVFLTKIEQENFLRKQRTFDNGVIPHQIHLTELRAIIANQKKHYPFLKEEQEKLESLLTFKIPYYVGPLAKKQENSPFAWLIRKSEEKIKPWNLPEIVDMEGSAVRFIERMINTDMYIPHNKVLPKNSLLYQKFSIYNELTKVRYQDERGQMNYFSSIEKKEIFHELFEKNRKVTKKDLQEFLYLKYDIKHAELSGIEKAFNASYTTYHDFLTMSENKREMKQWLEDPELASMFEEIIKTLTVFEDREMIKTRLSHHEATLGKHIIKKLTKKHYTGWGRLSKELIQGIRDKQSNKTILDYLINDDDFPHHRNRNFMQLINDDSLSFKKEIKKAQMITDTENLEEIVKELTGSPAIKKGILQSLKIVDEIVGIMGYEPANIVVEMARENQTTGRGLKSSRPRLKALEESLKDFGSQLLKEYPTDNSSLQKDRLYLYYLQNGRDMYTGAPLDIHRLSDYDIDHIIPRSFTTDNSIDNKVLVSSKENRLKKDDVPSEKVVKKMRSFWYDLYSSKLISKRKLDNLTKIKLTEEDKAGFIKRQLVETRQITKHVAGILHHRFNKAEDTNEPIRKVRIITLKSALVSQFRNRFGIYKVREINEYHHAHDAYLNGVVALALLKKYPQLAPEFVYGEYLKFNAHKANKATVKKEFYSNIMKFFESDTPVCDENGEIFWDKSKSIAQVKKVINHHHMNIVKKTEIQKGGFSEETVEPKKDSSKLLPRKNNWDPAKYGGLGSPNVAYTVAFTYEKGKARKRTNALEGITIMEREAFEQSPVLFLKNKGYEQAEIEMKLPKYALFELENGRKRMVASNKEAQKANSFLLPEHLVTLLYHAKQYDEISHKESFDYVNEHHKEFSEVFARVLEFAGKYTLAEKNIEKLEKIYKENQTDDLAKLASSFVNLMQFNAMGAPADFKFFDVTIPRKRYTSLTEIWQSTIIHQSITGLYETRIRMGK

SEQ ID NO: 421 - protein, 1340 aa, Enterococcus faecium
MKKEYTIGLDIGTNSVGWSVLTDDYRLVSKKMKVAGNTEKSSTKKNFWGVRLFDEGQTAEARRSKRTARRRLARRRQRILELQKIFAPEILKIDEHFFARLNESFLVLDEKKQSRHPVFATIKQEKSYHQTYPTIYHLRQALADSSEKADIRLVYLAMAHLLKYRGHFLIEGELNTENSSVTETFRQFLSTYNQQFSEADDKQTEKLDEAVDCSFVFTEKMSKTKKAETLLKYFPHEKSNGYLSQFIKLMVGNQGNFKNVFGLEEEAKLQFSKETYEEDLEELLEKIGDDYIDLFVQAKNVYDAVLLSEILSDSTKNTRAKLSAGMIRRYDAHKEDLVLLKRFVKENLPKKYRAFFGDNSVNGYAGYIEGHATQEDFYKFVKKELTGIRGSEVFLTKIEQENFLRKQRTFDNGVIPHQIHLTELRAIIANQKKHYPFLKEEQEKLESLLTFKIPYYVGPLAKKQENSPFAWLIRKSEEKIKPWNLPEIVDMEGSAVRFIERMINTDMYIPHNKVLPKNSLLYQKFSIYNELTKVRYQDERGQMNYFSSIEKKEIFHELFEKNRKVTKKDLQEFLYLKYDIKHAELSGIEKAFNASYTTYHDFLTMSENKREMKQWLEDPELASMFEEIIKTLTVFEDREMIKTRLSHHEATLGKHIIKKLTKKHYTGWGRLSKELIQGIRDKQSNKTILDYLINDDDFPHHRNRNCMQLINDDSLSFKKEIKKAQMITDTENLEEIVKELTGSPAIKKGILQSLKIVDEIVGIMGYEPANIVVEMARENQTTGRGLKSSRPRLKALEESLKDFGSQLLKEYPTDNSSLQKDRLYLYYLQNGRDMYTGAPLDIHRLSDYDIDHIIPRSFTTDNSIDNKVLVSSKENRLKKDDVPSEKVVKKMRSFWYDLYSSKLISKRKLDNLTKIKLTEEDKAGFIKRQLVETRQITKHVAGILHHRFNKAEDTNEPIRKVRIITLKSALVSQFRNRFGIYKVREINEYHHAHDAYLNGVVALALLKKYPQLAPEFVYGEYLKFNAHKANKATVKKEFYSNIMKFFESDTPVCDENGEIFWDKSKSIAQVKKVINHHHMNIVKKTEIQKGGFSKETVEPKKDSSKLLPRKNNWDPTKYGGLGSPNVAYTVAFTYEKGKARKRTNALEGITIMEREAFEQSPVLFLKNKGYEQAEIEMKLPKYALFELENGRKRMVASNKEAQKANSFLLPEHLVTLLYHAKQYDEISHKESFDYVNEHHKEFSEVFARVLEFAGKYTLAEKNIEKLEKIYKENQTDDLAKLASSFVNLMQFNAMGAPADFKFFDVTIPRKRYTSLTEIWQSTIIHQSITGLYETRIRMGK

SEQ ID NO: 422 - protein, 892 aa, Enterococcus faecium
MTFKIPYYVGPLAKKQENSPFAWLIRKSEEKIKPWNLPEIVDMEGSAVRFIERMINTDMYMPHNKVLPKNSLLYQKFSIYNELTKVRYQDERGQMNYFSSIEKKEIFHELFEKNRKVTKKDLQEFLYLKYDIKHAELSGIEKAFNASYTTYHDFLTMSENKREMEQWLEDPELASMFEEIIKTLTVFEDREMIKTRLSHHKATLGKHIIKKLTKKHYTGWGRLSKELIQGIRDKQSNKTILDYLINDDDFPHHRNRNFMQLINDDSLSFKKEIKKAQMITDTENLEEIVKELTGSPAIKKGILQSLKIVDEIVGIMGYEPANIVVEMARENQTTGRGLKSSRPRLKALEESLKDFGSQLLKEYPTDNSSLQKDRLYLYYLQNGRDMYTGAPLDIHRLSDYDIDHIIPRSFTTDNSIDNKVLVSSKENRLKKDDVPSEKVVKKMRSFWYDLYSSKLISKRKLDNLTKIKLTEEDKAGFIKRQLVETRQITKHVAGILHHRFNKAEDTNEPIRKVRIITLKSALVSQFRNRFGIYKVREINEYHHAHDAYLNGVIALALLKKYPQLAPEFVYGEYLKFNAHKANKATVKKEFYSNIMKFFESDTPVCDENGEIFWDKSKSIAQVKKVINHHHMNIVKKTEIQKGGFSKETVEPKKDSSKLLPRKNNWDPAKYGGLGSPNVAYTVAFTYEKGKARKRTNALEGITIMEREAFEQSPVLFLKNKGYEQAEIEMKLPKYALFELENGRKRMVASNKEAQKANSFLLPEHLVTLLYHAKQYDEISHKESFDYVNEHHKEFSEVFARVLEFAGKYTLAEKNIEKLEKIYKENQTDDLAKLASSFVNLMQFNAMGAPADFKFFDVTIPRKRYTSLTEIWQSTIIHQSITGLYETRIRMGK

SEQ ID NO: 423 - protein, 1336 aa, Enterococcus hirae
MTKDYTIGLDIGTNSVGWAVLTDDYQLMKRKMSVHGNTEKKKIKKNFWGARLFDEGQTAEFRRTKRTNRRRLARRKYRLSKLQDLFAEELCKQDDCFFVRLEESFLVPEEKQYKPASIFPTLEEEKEYYQKYPTIYHLRQKLVDSTEKEDLRLVYLALAHLLKYRGHFLFEGDLDTENTSIEESFRVFLEQYSKQSDQPLIVHQPVLTILTDKLSKTKKVEEILKYYPTEKINSFFAQCLKLIVGNQANFKRIFDLEAEVKLQFSKETYEEDLESLLEKIGDEYLDIFLQAKKVHDAILLSEIISSTVKHTKAKLSSGMVERYERHKADLAKFKQFVKENVPQKATVFFKDTTKNGYAGYIKGKTTQEEFYKFVKKELSGVVGSEPFLEKIDQETFLLKQRTYTNGVIPHQVHLIELKAIIDQQKQHYPFLEEAGPKIIALFKFRIPYYVGPLAKEQEASSFAWIERKTAEKINPWNFSEVVDIEKSAMRFIQRMTKQDTYLPTEKVLPKNSLLYQKYMIFNELTKVSYKDERGVKQYFSGDEKQQIFKQLFQKERGKITVKKLQNFLYTHYHIENAQIFGIEKAFNASYSTYHDFMKLAKTNQKAMQEWLEQPEMEPIFEDIVKILTIFEDRQMIKHQLSKYQEVFGEKLLKEFARKHYTGWGRFSAKLIHGIRDRKTNKTILDYLINDDDVPANRNRNLMQLINDEHLSFKEEIAKATVFSKHKSLVDVIQDLPGSPAIKKGIWQSLKIVEELIAIIGYKPKNIVIEMARENQKTHRTSPRLKALENGLKQIGSTLLKEQPTDNKALQKERLYLYYLQNGRDMYTGEPLEIENLHQYEVDHIIPRSFIVDNSIDNKVLVASKQNQKKRDDVPKKQIVNEQRIFWNQLKEAKLISPKKYAYLTKIELTPEDKARFIQRQLVETRQITKHVANILHQSFNQEEEGTDCDGVQIITLKATLTSQFRQTFGLYKVREINPHHHAHDAYLNGFIANVLLKRYPKLAPEFVYGKYVKYSLARENKATAKKEFYSNILKFLESDEPFCDENGEIYWEKSHHLPRIKKVLSSHQVNVVKKVEQQKGGFYKETVNSKEKPDKLIERKNNWDVTKYGGFGSPVIAYAIAFVYAKGKTQKKTRAIEGITIMEQAAFEKDPTTFLKEKGFPQVTEFIKLPKYTLFEFDNGRRRFLASHKESQKGNPFILSDQLVTLLYHAQHYDKITYQESFDYVNTHLSDFSAILTEVLAFAEKYTLADKNIERIQELYEENKYGETSMIAQSFLQLLQFNAIGAPADFKFFGVTIPRKRYTSLTEIWDATIIYQSVTGLYETRIRMGDLWAGEQ

SEQ ID NO: 424 - protein, 116 aa, Enterococcus sp.
MYSIGLDLGISSVGWSVIDERTGNVIDLGVRLFSAKNSEKNLERRTNRGGRRLIRRKTNRLKDAKKILAAVGFYEDKSLKNSCPYQLRVKGLTELLSKGEIYKVTLHILKNVELVT

SEQ ID NO: 425 - protein, 1391 aa, Eubacterium sp.
MENKQYYIGLDVGTNSVGWAVTDTSYNLLRAKGKDMWGARLFDEAKTAVERRTKRTSRRRSEREKARKAMLKELFADEINKVDPNFFIRLEESKFFLDDRSENNRQRYTLFNDAKFTDKDYYEKYKTIFHLRSALINSDEKFDVRLVFLAILNLFSHRGHFLNASLKGDGEIQGVDIFYNDLYEVCEEFEIDLPQISNIDNFEKILSQKGKSRTKILEELSEELSISKKEKIKYSLLKLICGMKIKVVDIYADEDIQEDDKKKDLGFRESDYEKSSLEVKEIIGDDHFELIERAKAVHDIGLLANIIGNSKYLCEARVEAYDNHHKDLQKIKELLKKYDIKAYTDMFRKMTDKNYSAYVGSVNSNIAKERRSVDNRKIEDLYEYIKKIALKNISDDNEDKIEILKKIETGEFLKKQLTASNGVIPNQLQSRELRAILKKAENYLPFLKEKGEKNLTVSEMIIQLFEFQIPYYVGPLDKNPKKDKNANSWAVIPSGGRILPWNFEDKVDVKGSRKEFIEKMVRKCTYLSEEHTLPKQSLLYEKFMVLNEINNIKIDGEKISVEAKQKIYNDLFMKGKKVSQKAIKQELISLNIMSKDSVLSGIDTVCNAYLSSIAKFRGVFDENVNNQSTIDMIEDIIFLKTVYSDEKRFVKEEIVEKYGDEIDKDKIKRILGFKFSNWGNISKSFLELEGADVGTGEIRSIIQSLWETNFNLMELLSSRFTYMDELEKRVKKLEKPLSEWTIEDLDDMYLSSPVKRMIWQSMKIVDEIQTVIGYAPKRIFVEMTRSEGEKVRTKSRKDRLKELYSAIKEDSKQWVKELDAKDESYFRSKKMYLYYLQKGRCMYSGEVIELDKLMDDNLYDIDHIYPRSFVKDDSLDNLVLVKKEINNRKQNDPITPQIQASCQGFWKVLHEQGFISNEKYSRLTRKTQEFSDEEKLSFINRQIVETGQATKCMAQILQKSMGEDVDVVFSKARLVSEFRHKFELFKSRLINDFHHANDAYLNIVVGNSYFVKFTRNPANFIKDARKNPDNPAYKYHMDRFFERDVKSKSEVAWIGQSEGNAGTIAIVKKTMSKNSPLITKKVEEGHGSITKETIVGVKEIKFGRNKVEKADKTPKKANLQAYRPIKTSDERLCNILRYGGRTSISISGYCLVEYVKKRKTIRSLEAIPVYLGRKDSLSEEKLLNYFRYNLNDGGKDSVSDIRLCLPFISTNSLVKIDGYLYYLGGKNDDRIQLYNAYQLKMKKEEVEYIRKIEKAVSMSKFDEIDREKNPVLTEEKNIELYNKIQDKFENTVFSKRMSLVKYNKKDLSFGDFLKNKKSKFEEIDLEKQCKVLYNIIFNLSNLKEVDLSDIGGSKSTGKCRCKKNITNYKEFKLIQQSITGLYSCEKDLMTI

SEQ ID NO: 426 - protein, 1391 aa, Eubacterium yurii
MENKQYYIGLDVGTNSVGWAVTDTSYNLLRAKGKDMWGARLFEKANTAAERRTKRTSRRRSEREKARKAMLKELFADEINRVDPSFFIRLEESKFFLDDRSENNRQRYTLFNDATFTDKDYYEKYKTIFHLRSALINSDEKFDVRLVFLAILNLFSHRGHFLNASLKGDGDIQGMDVFYNDLVESCEYFEIELPRITNIDNFEKILSQKGKSRTKILEELSEELSISKKDKSKYNLIKLISGLEASVVELYNIEDIQDENKKIKIGFRESDYEESSLKVKEIIGDEYFDLVERAKSVHDMGLLSNIIGNSKYLCEARVEAYENHHKDLLKIKELLKKYDKKAYNDMFRKMTDKNYSAYVGSVNSNIAKERRSVDKRKIEDLYKYIEDTALKNIPDDNKDKIEILEKIKLGEFLKKQLTASNGVIPNQLQSRELRAILKKAENYLPFLKEKGEKNLTVSEMIIQLFEFQIPYYVGPLDKNPKKDNKANSWAKIKQGGRILPWNFEDKVDVKGSRKEFIEKMVRKCTYISDEHTLPKQSLLYEKFMVLNEINNIKIDGEKISVEAKQKIYNDLFVKGKKVSQKDIKKELISLNIMDKDSVLSGTDTVCNAYLSSIGKFTGVFKEEINKQSIVDMIEDIIFLKTVYGDEKRFVKEEIVEKYGDEIDKDKIKRILGFKFSNWGNLSKSFLELEGADVGTGEVRSIIQSLWETNFNLMELLSSRFTYMDELEKRVKKLEKPLSEWTIEDLDDMYLSSPVKRMIWQSMKIVDEIQTVIGYAPKRIFVEMTRSEGEKVRTKSRKDRLKELYNGIKEDSKQWVKELDSKDESYFRSKKMYLYYLQKGRCMYSGEVIELDKLMDDNLYDIDHIYPRSFVKDDSLDNLVLVKKEINNRKQNDPITPQIQASCQGFWKILHDQGFMSNEKYSRLTRKTQEFSDEEKLSFINRQIVETGQATKCMAQILQKSMGEDVDVVFSKARLVSEFRHKFELFKSRLINDFHHANDAYLNIVVGNSYFVKFTRNPANFIKDARKNPDNPVYKYHMDRFFERDVKSKSEVAWIGQSEGNSGTIVIVKKTMAKNSPLITKKVEEGHGSITKETIVGVKEIKFGRNKVEKADKTPKKPNLQAYRPIKTSDERLCNILRYGGRTSISISGYCLVEYVKKRKTIRSLEAIPVYLGRKDSLSEEKLLNYFRYNLNDGGKDSVSDIRLCLPFISTNSLVKIDGYLYYLGGKNDDRIQLYNAYQLKMKKEEVEYIRKIEKAVSMSKFDEIDREKNPVLTEEKNIELYNKIQDKFENTVFSKRMSLVKYNKKDLSFGDFLKNKKSKFEEIDLEKQCKVLYNIIFNLSNLKEVDLSDIGGSKSTGKCRCKKNITNYKEFKLIQQSITGLYSCEKDLMTI

SEQ ID NO: 427 - protein, 1142 aa, Facklamia hominis
MYSVGLDIGIASCGYSIINDVNGNIVELGTLLFKSRNSDNNEERRTNRGSRRLINRRRTRLDDGKKLLAEKGFKQDSKLKHVCPYELRVKGLHEKLTQGEIYKVVLHILKKRGISYLDESDENSSGIDGASYKDQVNLNLNLQKELTPGQIQLKRLKENGRIKSGVTFENGYQLNVFSVSAYANELNKILTKQSEYYSEIDQIWIDRFTKNGYRKEAGLVYRKRPYYDGPGNEKNNSIYGRWANFKEDGHPKENIFDQLIGLDSVDSTQVRASASTLTAQKYNLLNDLNNLTIIEDDRKFTTDEKVSIINYLMTQDITRFGPKELAKFYQLEVDQIRGWRIDNKGNPEIHSLKVYRDWKKIFNTSSIDLTSIQTWVVDELANVITLNTEIPSTLATLKIKIPDIDQQILNFVENNFYELKKKTSKNSWHSFSLKTLNILIPELLNTSEEQNTILERLNLKFDLKNKYAEKNQIPVKELLEQIYNPTVTKSVHQSIKLFNEIIEKYGKNNISYVTIEMPRDKNDQDQKDTIKRINKLNSERKNDSEKYFLERSGWDTIRFESALKKPRFAEKLLFYYEQKGKCAYSGQDILAESLLNESCEVDHIIPLSISFDDSIHNKVLVTASSNQEKGQRTPYMAFIDGAKLGQSWDDFVAWVNSCGFHRKKVQNLLYEENIFNPDVQRGFVSRNLNDTRYASRIVLNAIQSFFYKQKDLTKVKVVNGSFTHTLRKKWGSSLDKNRDTYHHHAVDATLCAVTPFINIVKYEFFEEDGIKYMVDLTTGEKVAYSDYKKMKFYDKRAYVPIWDGFIKQLTPANLYPKIKFSHQVDSKWNRKISDATIYSTRKIVETKINKKGVAKETVKDIVIDKIKDIYTPEGWRKFKEKQDKLLMKNFDEKTYNKLIKIAKEYPEKKEVQTSNGKVSLVEVSPFKMYCEEQNVPAIRKYSKKGNGPYIRSLKFYDKELGKHINITKDSYGNDIERTIRNKKIILKNQNSWRTDVYYNSVNNCYELLGIKYCHLKFYRGKYGIPKSIYDELKKEDEISSESVFKFSLYRHDRVRFEKDGEYIEALFGSKNESNKNYLELSPIDKNKWLSKENVKFFGEVAASGRFIKGLKPGIKVIKQSTDYMGHVYAIHQEKLKFVLSDA

SEQ ID NO: 428 - protein, 1347 aa, Finegoldia magna
MKSEKKYYIGLDVGTNSVGWAVTDEFYNILRAKGKDLWGVRLFEKAKTAADTRTFRSGRRRNDRKGMRLQILREIFEDEIKKVDKDFYDRLDESKFWAEDKKVSGKYSLFNDKNFSDKQYFEKFPTIFHLRKYLMEEHGKVDIRYYFLAINQMMKRRGHFLIDGQISHVTDDKPLKEQLILLINDLLKIELEEELMDSIFEILADVNEKRTDKKNNLKELIKGQDFNKQEGNILNSIFESIVTGKAKIKNIISDEDILEKIKEDNKEDFVLTGDSYEENLQYFEEVLQENITLFNTLKSTYDFVILQSILKGKSTLSDAQVERYDEHKKDLEILKKVIKKYDEDGKLFKQVFKEDNGNGYVSYIGYYLNKNKKITAKKKISNIEFTKYVKGILEKQCDCEDEAVKYLLGKIEQENFLLKQISSINSVIPHQIHLFELDKILENLAKNYPSFNNKKEEFTKIEKIRKTFTFRIPYYVGPLNDYHKNNGGNAWIFRNKGEKIRPWNFEKIVDLHKSEEEFIKRMLNQCTYLPEETVLPKSSILYSEYMVLNELNNLRIKGKPLDTDVKLKLIEELFKKKTKVTLKSIRDYMIRNNFADKEDFDNSEKNLEIVSNMKSYIDFNNILGDKFELEMVEDLIEKITIHTGNKTLLKKYIEETYPDLSSSQIQKIINLKYKDWGRLSRKLLDGIKGRNKTDDVNTVINFMRNSSDNLMQIIEGKNYSFNEYIDNLRKKYIPQEISYEVVENLYVSPSVKKMIWQVIRVTEEITKVMGYDPDKIFIEMAKSEEEKKTTISRKNKLLDLYKAIKKDERDSQYEKLLTGLNKLDESELRSKKLYLYYTQMGRDMYTGEKIDLDKLFDSTHYDKDHIIPQSMKKDDSIINNLVLVNKNANQTTKGNIYPVPSSIRNNPDIYNYWKYLMEKEFISKEKYNRLIRNTPLTNEELGVFINRQLVETRQSTKAIKELFEKFYQKSKIIPVKASLASDLRKDMNTLKSREVNDLHHAHDAFLNIVAGDVWNREFTSNPINYVNENREGDKVKYSLSKYFTRPRKSKGKVIWTPEKGRKLIVDTLNKPSVLISNESHVKKGELFNATISGKKDYKKGKIYLPLKKDDRLKDVSKYGGYKAINGAFFFLVEHTKSKKRIRSIELFPLHLLSKFYEDKNTVLDYAINVLQLQDPKIIIDKINYRTEIIIDNFSYLISTKSNDGSITVKPNEQMYWRVDEISNLKKIENKYKKDAILTEEDRKIMESYIDKIYQQFKAGKYKNRRTTDTIIEKYEIIDLDTLDNKQLYQLLVAFISLSYKTSNNAVDFTVIGLGTECGKPRITNLPDNTYLVYKSITGIYEKRIRIK

SEQ ID NO: 429 - protein, 1348 aa, Finegoldia magna; identical to SEQ ID NO: 227

SEQ ID NO: 430 - protein, 1516 aa, Flavobacteriaceae bacterium
MLKQQKDKIIGMNKKILGLDLGTNSIGWALVKQDLENKYGEIIGCGSRIIPMSQDVLGKFDAGISISQTAERTNYRSVRKLIQRNTLRRERLHRVLHQLDFLPKHYNDSIDFEKKLGQFKTDKETKLNYFVNQHGKHEFLFKDSFNEMVKEFKEEQPELFYIKNNGKETKIPYDWTIYYLRKKALSKKISKEELSWLVLNFNQKRGYYQLRGEIDEEKEKNKRYEKLYVSEVVKTNNTIKKTGEYLYDIYFDNGWKYEKQTTKPQDWLHKHKEFIITTTTLKNGETKRTFKTVDSEKDWIAIKSKTEQDIKESNKTVGAFIYDTLLKNPTQKIRGSLVKTIERKFYREEFEKILKEQIKHRPEINVNTAIGKENYTKCVTELYPRNEAHANNILTNDFNYLFTKDILFYQRPLKSKKSEIANCQYEYRTYIKKKEKTGKEERVKQPLKATPKSHPLFQEFRLWQFIHNLKIYIRETTVGNKPLFDVDITDTFFTSENDWATLFEYLNNKKEIEQKHVLEYLVSKKIISKSEKTDYRWNYVEDKKYPGNETRVDFINRLKKVENLNVDEFLTSELEFKLWHIIYSVTDKNEYEKALENFAIRQNIDKDSFVNSFKKFPPFKSDYGAYSTKAIKKLLPLMRLGKFWDGSEIPKVVVEKITDIKTRLTSVNYDESLFKKDEKKILETIVDDITPKQLLKSFVKLKGKNHLAGLNTYQACYLVYERHSESSDITQWENPDDIDSFLNHFKQHSLRNPIVEQVVTETLRTVRDIWKYYGNGSPNYFNEIHIELGREMKNPADKRKQMSAKINENENTNQRIKGILQELMNDGVQDIKPYSPSQQEILKIYEEGISQNPNVDYSKVSEDEITKIKKSNNPTLKEIQRYKLWLEQKYISPYTGKPIPLSELFTPAYQIEHIIPQSRYFDNSLSNKIICESEVNEDKSNKTAYEYLKTNGGSIVHGHHLLSLKEYEDHCQHYFKKNRTKLKNLLSEEIPEGFINRQLNDSRYISKLIKGLLSNIVREENEQEATSKNIVPVTGSITSKLKQDWGLNDKWNEIIAPRFKRLNKMTNSNDFGYFDEKINTFRIQVPDAISRGFNKKRIDHRHHTLDALVIACCTKKHIQYLNSLNNEIIKHELKPSILIKNAQGDYTKHFMLPWNNFPIDCKNAIENTIVSFKQNLRVINKTSNKYQSYKDENGNLRLGKDGKPKKGLTKQTKGNNWAVRKAMHEDTFYGEIVDGENKGKLKIKTLLDTSFDVKKIEDKVLDKSIRTILINYLKQDKYKNLSKPHEEAFSPNGIIEMNKNIISLNNNIPHKPIKRVTLKHEKGKKFSIKTLLDKKTKFAKSATGTNVFFCIYKNINGKIKYHTPSFEEIIEIQKQEFEIKYKSKLNVPETLFDKKESFELLFYLQPNDLVYLPNDEELKNRQLIDFNNLNKKQIKRIYKFTDGSGTTANFIPYQVAKVIFNLNKKEQAKSSFKYPIQNEFGVGSPQSKNQKSIEGILIKERCIKLKIDRLGNISKA

SEQ ID NO: 431 - protein, 1629 aa, Francisella cf.
MNFKILPIAIDLGVKNTGVFSAFYQKGTSLERLDNKNGKVYELSKDSYTLLMNNRTARRHQRRGIDRKQLVKRLFKLIWTEQLNLEWDKDTQQAISFLFNRRGFSFITDGYSPEYLNIVPEQVKAILMDIFDDYNGEDDLDSYLKLATEQESKISEIYNKLMQKILEFKLRKLCTDIKDDKVSTKTLKEITSYEFELLADYLANYSEILKTQKFSYTDKQGNLKELSYYHHDKYNIQEFLKRHATINIQILDTLLTDDLDIWNFNFEKFDFDKNEEKLQNQEDKDHIQAHLHHFVFAVNKIKSEMASGGRHRSQYFQEITNVLDENNHQEGYLKNFCENLHNKKYSNLSVKNLVNLIGNLSNLELKPLRKYFNDKIHAKADHWDEQKFTETYCHWILGEWRVGVKDQDKKDGAKYSYKDLCNELKQKVTKAGLVDFLLELDPCRTIPPYLDNNNRKPPKCQSLILNPKFLDNQYPNWQQYLQELKKLQSIQNYLESFETDLKVLKSSKDQPYFVEYRSSNQQIASGQRDYKDLDARILQFIFDRVKASDELLLNEIYFQAKKLKQKASSELEKLESSKKLDEVIANSQLSQILKSQHTNGIFEQGTFLHLVCKYYKQRQRARDSRLYIMPEYRYDKKLHKYNNTGRFDDDNQLLTYCNHKPRQKRYQLLNDLAGVLQVSPNFLKDKIGSDDDLFISKWLVEHIRGFKKACEDSLKIQKDNRGLLNHKINIARNTKGKCEKEIFNLICKIEGSEDKKGNYKHGLAYELGVLLFGEPNEASKPEFDRKIKKFNSIYSFAQIQQIAFAERKGNANTCAVCSADNAHRMQQIKITEPVEDNKDKIILSAKAQRLPAITTRIVDGAVKKMATILAKNIVDDNWQNIKQVLSAKHQLHIPIITESNAFEFEPALADVKGKSLKDRRKKALERISPENIFKDKNNRIKEFAKGISAYSGANLTDGDFDGAKEELDHIIPRSHKKYGTLNDEANLICVTRGDNKNKGNRIFCLRDLANNYKLKQFETTDDLEIEKKIADTIWDANKKDFKFGNYRSFINLTPQEQKAFRHALFLADENPIKQAVIRAINNRNRTFVNGTQRYFAEVLANNIYLRAKKENLNTDKISFDYFGIPTIGNGRGIAEIRQLYEKVDSDIQAYAKGDKPQASYSHLIDAMLAFCIAADEHRNDGSIGLEIDKNYSLYPLDKNTGEVFTKDIFSQIKITDNEFSDKKLVRKKATEGFNTHRQMTRDGIYAENYLPILIHKELDEVRKGYTWKNSEEIKIFKGKKYDIQQLNNLLYCLKFVDKPISIDIQISTLEELRNILTTNNIAATAEYYYINLKTQKLHEYYIENYNTALGYKKYTKEMEFLRSLAYRSERVKIKSIDDVKQVLDKDSNFIIGKITLPFKKEWQRLYREWQNITIKDDYEFLKSFFNVKSITKLHKKVRKDFSLPISTNEGKFLVKRKTWDNNFIYQILNDSDSRVDGTKPFIPAFDISKNEIVEAIIDSFTSKNIFWLPKNIELQKVDNKNIFAIDTSKWFEVETPSDLRDIGVATIQYKIDNNSRPKVRVKLDYVIDDDSKINYFTNHSLLKSRYPDKVLEILKQSTIIEFESSGFNKTIKEMLGMTLAGIYNETSNN

SEQ ID NO: 432 - protein, 1646 aa, Francisella cf.
MNIKILPIAIDLGAKNTGVFSAFYQKGTSLESLDNKNGKVYELSKDSYTLLMNNRTARRHQRRGIDRKQLVKRLFKLIWTKQLNLEWNKDTQQTISFLLNRRGFSFITDGYSPEYLNIAPEAVKAILMSILDDYNGEDDLDSYLQSATENDSKIDELYNKLLQKALEFKLRKLCIDIKEDKVTTKTLKELSNTEFKLLANYLVDYDRILRTQKFSYTDKQGNLRELNYYHHDKYNIQEFLKRNIIINDVILEKLTDDLDIWNLNFDKFDFEKNLEKLENQEDKDYLQTHLHHFVFAVNKIKSEMASGGRHRSQYFQEITNVLVENNHQEGYLKNFCENLHNKKYSNLSVKNLVNLIGNLSNLELKPLRKYFNDKIHAKADYWDEQKFAETYSDWILGEWRVGAKDKDKKDGAKYSYKNLCDELKQKVGINQDGIINQTKSDFVDFLLELDPCRTIPPYLDNNNRKPPKCQSLILNPKFLDNKYPNWQQYLQELKKLQTVQNYLGNFEIDLKDLKSSKEQPYFVKYKSLNQQIASGQRDYKDLDARVLQFIFDRVKASDELLLNEIYSHAKKLKQNTSSELEKLELCKKLDEVIANSQLSQILKSQHVNGIFEQGTFLHLVCKYYKQRQRARDSRLYIMPEYRYDKKLDKYNNTGRFDDDNQLLTYCNHKPRQKRYQLLNDLAGVLQVSPNFLKDKIGSDDDLFISKWLVEHIRGFKKACEDSLKIQKDNRGLLNHKINIARNTKGKCEKEIFNLICKIEGSEDKKGNYKHGLAYELGVLLFGEPNQASKLEFDRKIKKFNSIYSFAQIQQIAFAERKGNANTCAVCSADNAHRMQQIKVAKPVEGNKDNIILSAKAQRLPAIPTRIVDGAVKKIATILARNIVDDNWDNIKQALSNNQQLHVPIITESNAFEFEPALADIKGKSLKDKRKKALERIDPENVFKDKNNRIKEFAKGISAYSDANLANGDFDGAKEELDHIIPRSHKKYGTLNDEANLICVTREDNQNRGNKAVFLYDLKPNYKLKQFNTTDDLEIEKKIADTIWDASKQDFKFGNYRSFINLTPQEQIAFRHALFLADKNPIKKAVIRAIDNRNRTFVNGTQRYFAEVLANNIYLRAKKENLATNRITFDYFGIETTNSNGRGIADVRKLYEKVDSDIQAYAKGDKPQDSYSHLIDAMIAFCVAADEHKNEGSIGLKMGNQYGLFPTPDKYDENTGEIISWHNDDIFRKIKVSDNQFSDKKLVRKKATEGFNTHRQMTRDGIYGESYLPILIHKNLNEVRKGYNWENSEEIKIFKGKKYDIQQLNNLVYCLKFVDKPISIDIQITTLEELRNILETNNISTTAEYYYINLKTQKLHEYYIENYNTALGYKKYTKEMEFLRSLAYRTERVKIKSIDDVSMILAKDSNFKAGKIELPFKTEWQRLYLEWQNTTIKDNHEFLKSYFSVKNATKQHKKVRKDFSLPISTNEGKLLVKRKTWDNNFIYQILNDSDSRADGTKPFIPAFDISKNEIVETIIKSFTSKNIFWLPKNIELQKVDNKSIFAIDTSRWFEVETPKDLIEIGVSTIQYKIDNNSRPKVRVKLDYVMDDDSKINYFMNHSLLKSRYPDKVLEILKQSTIIEFESSGFNKTIKEMLGMTLAGIYNETSNN

SEQ ID NO: 433 - protein, 1629 aa, Francisella novicida
MNFKILPIAIDLGVKNTGVFSAFYQKGTSLERLDNKNGKVYELSKDSYTLLMNNRTARRHQRRGIDRKQLVKKLFKLIWTEQLNLEWDKDTQQAISFLFNRRGFSFITDGYSPEYLNIVPEQVKAILMDIFDDYNGEDDLDSYLKLATEQESKISEIYNKLMQKILEFKLRKLCTDIKDDKVSTKTLKEITSYEFELLADYLANYSESLKTQKFSYTDKQGNLKELSYYHHDKYNIQEFLKRHATINDEILDTLLTDDLDIWNFNFEKFDFDKNEEKLQNQEDKDHTQAHLHHFVFAVNKIKSEMASGGRHRGQYFQEITNVLDENNHQEGYLKNFCENLHNKKYSNLSVKNLVNLIGNLSNLELKPLRKYFNDKIHAKADHWDEQKFTETYCHWILGEWRVGLKDQDKKEGAKYSYKDLCNELKQKVTNAGLIDFLLELDPCRTIPPYLDNNNRKPPKCQSLILNPKFLDNQYPNWQQYLQELKKLQIIQDYLESFETDLKVLKSSKDQPYFVEYKSSNQQIASGQRDYKDLDARILQFIFDRVKASDELLLNEIYFQAKKLKQKASSELEKLESSKKLDEVIANSQLSKILKSQHTNGIFEQGTFLHLVCKYYKQRQRARDSRLYIMPEYRYDKKLDKYNNTGRFDDDNQLLTYCNHKPRQKRYQLLNDLAGVLQVSPNFLKDKIGSDDDLFISKWLVEHIRGFKKACEDSLKIQKDNRGLLNHKINIARNTKGKCEKEIFNLICKIEGSEDKKGNYKHGLAYELGVLLFGEPNEASKPEFDRKIKKFNSIYSFAQIQQIAFAERKGNANTCAVCSADNAHRMQQIKITEPVEDNKDKIILSAKAQRLPAIPTRIVDGAVKKMATILAKNIVDDNWQNIKQVLSAKHQLHIPIITESNAFEFEPALADVKGKSLKDRRKKALERISPENIFKDKNNRIKEFAKGISAYSGANLTDGDFDGAKEELDHIIPRSHKKYGTLNDEANLICVTRDDNKNKGNRIFCLHDLANNYKLKQFETTDDLEIEKKIADTIWDASKKDFKFGNYRSFINLTPQEQKAFRHALFLADENPIKQAVIRAINNRNRTFVNGTQRYFAEVLANNIYLRAKKENLNTDKISFDYFGIPTIGNGRGIAEIRQLYEKVDSDIQVYAKGDKPQASYSHLIDAMLAFCIAADEHRNDGSIGLEIDKNYSLYPLDKNTGEVFTKDIFSQIKITDNEFSDKKLVRKKATEGFNTHRQMTRDGIYAENYLPILIHKELDEVRKGYTWKNSEEIKIFKGKKYDIQQLNNLLYCLKFVDKPISIDIQISTLEELRNILTTNNIAATAEYYYINLKTQKLHEYYIENYNTALGYKKYTKEMEFLRSLAYRSERVKIKSIDDVKQVLDKDSNFIIGKITLPFKKEWQRLYREWQNTTIKDDYEFLKSFFNVKSITKLHKKVRKDFSLPISTNEGKFLVKRKTWDNNFIYQILNDSDSRVDGTKPFIPAFDISKNEIVEAIIDSFTSKNIFWLPKNIELQKVDNKNIFAIDTSKWFEVETPSDLRDIGVATIQYKIDNNSRPKVRVKLDYVIDDDSKINYFTNHSLLKSRYPDKVLEILKQSTIIEFESSGFNKTIKEMLGMTLAGIYNETSNN

SEQ ID NO: 434 - protein, 1629 aa, Francisella novicida
MNFKILPIAIDLGVKNTGVFSAFYQKGTSLERLDNKNGKVYELSKDSYTLLMNNRTARRHQRRGIDRKQLVKRLFKLIWTEQLNLEWDKDTQQAISFLFNRRGFSFITDGYSPEYLNIVPEQVKAILMDIFDDYNGEDDLDSYLKLATEQESKISEIYNKLMQKILEFKLMKLCTDIKDDKVSTKTLKEITSYEFELLADYLANYSESLKTQKFSYTDKQGNLKELSYYHHDKYNIQEFLKRHATINDRILDTLLTDDLDIWNFNFEKFDFDKNEEKLQNQEDKDHIQAHLHHFVFAVNKIKSEMASGGRHRSQYFQEITNVLDENNHQEGYLKNFCENLHNKKYSNLSVKNLVNLIGNLSNLELKPLRKYFNDKIHAKADHWDEQKFTETYCHWILGEWRVGVKDQDKKDGAKYSYKDLCNELKQKVTKAGLVDFLLELDPCRTIPPYLDNNNRKPPKCQSLILNPKFLDNQYPNWQQYLQELKKLQSIQNYLDSFETDLKVLKSSKDQPYFVEYKSSNQQIASGQRDYKDLDARILQFIFDRVKASDELLLNEIYFQAKKLKQKASSELEKLESSKKLDEVIANSQLSQILKSQHTNGIFEQGTFLHLVCKYYKQRQRARDSRLYIMPEYRYDKKLHKYNNTGRFDDDNQLLTYCNHKPRQKRYQLLNDLAGVLQVSPNFLKDKIGSDDDLFISKWLVEHIRGFKKACEDSLKIQKDNRGLLNHKINIARNTKGKCEKEIFNLICKIEGSEDKKGNYKHGLAYELGVLLFGEPNEASKPEFDRKIKKFNSIYSFAQIQQIAFAERKGNANTCAVCSADNAHRMQQIKITEPVEDNKDKIILSAKAQRLPAIPTRIVDGAVKKMATILAKNIVDDNWQNIKQVLSAKHQLHIPIITESNAFEFEPALADVKGKSLKDRRKKALERISPENIFKDKNNRIKEFAKGISAYSGANLTDGDFDGAKEELDHIIPRSHKKYGTLNDEANLICVTRGDNKNKGNRIFCLRDLADNYKLKQFETTDDLEIEKKIADTIWDANKKDFKFGNYRSFINLTPQEQKAFRHALFLADENPIKQAVIRAINNRNRTFVNGTQRYFAEVLANNIYLRAKKENLNTDKISFDYFGIPTIGNGRGIAEIRQLYEKVDSDIQAYAKGDKPQASYSHLIDAMLAFCIAADEHRNDGSIGLEIDKNYSLYPLDKNTGEVFTKDIFSQIKITDNEFSDKKLVRKKAIEGFNTHRQMTRDGIYAENYLPILIHKELNEVRKGYTWKNSEEIKIFKGKKYDIQQLNNLVYCLKFVDKPISIDIQISTLEELRNILTTNNIAATAEYYYINLKTQKLHEYYIENYNTALGYKKYSKEMEFLRSLAYRSERVKIKSIDDVKQVLDKDSNFIIGKITLPFKKEWQRLYREWQNTTIKDDYEFLKSFFNVKSITKLHKKVRKDFSLPISTNEGKFLVKRKTWDNNFIYQILNDSDSRVDGTKPFIPAFDISKNEIVEAIIDSFTSKNIFWLPKNIELQKVDNKNIFAIDTSKWFEVETPSDLRDIGVATIQYKIDNNSRPKVRVKLDYVIDDDSKINYFTNHSLLKSRYPDKVLEILKQSTTIEFESSGFNKTIKEMLGMTLAGIYNETSNN

SEQ ID NO: 435 - protein, 244 aa, Francisella tularensis
ARKQNSEIYNKLMQKILEFKLRKLCTDIKDDKVSTKTLKEITSYEFELLADYLANYSESLKTQKFSYTDKQGNLKELSYYHHDKYNIQEFLKRHATINDEILDTLLTDDFDIWNFNFEKFDFDKNEEKLQNQEDKDHTQAYLHHFVFAVNKIKSEMASGGRHRSQYFQEITNVLDENNHQEGYLKNFCENLHNKKYSNLSVKNLVNLVGNLSNLELKPLRKYFNDKNLIIGMSKSLQKLIATGY

SEQ ID NO: 436 - protein, 501 aa, Francisella tularensis
MEIEKKIADTIWDASKQDFKFGNYRSFINLTPQEQKAFRYALFLADENSIKQAVIRAINNRNRTFVNGTQRYFAEVLANNIYLRAKKENLNTDKISFDYFGIPTIGNGRGIADIRQLYEKVDSDIQAYAKGDKPQASYSHLIDAMIAFCVAADEHRNDGSIGLEIDKNYSLYLLDKNTGEVFTKDIFSQIKITDNEFSDKKLVRKKATEGFNTHRQMTRDGIYAENYLPILIHKELDEVRKGYTWGNSEELKIHKGKKYNIQQLNNIVYCLKFIDKSISIDIQISTLEELRNILTTNNIAATAEYYYINLKNQKLHEYYIENYNTALDYKKYSKEMEFLRSLAYRSERVKIKSIDDVKQVLDKDSNFIIGKITLPFKKEWQRLYLEWQNTTIKDDYEFLKSFFNVKSITKLHKKVRKDFSLPISTNEGKFLVKRKTWDNNFIYQILNDSDSRVDGTKPFIPAFDISKNEIVEAIIDSFTSKNIFWLPKNIELQNVDKIFLL

SEQ ID NO: 437 - protein, 158 aa, Francisella tularensis
MIDFLLELDPCITIPPYLDNNNRKPPKCQSLILNPKFLDNQYPNWQQYLQELKKLQSIQDYLDSFETDLKDLKSSKDQPYFVEYKSSNQQMASGQRDYKDLDARILQFIFDRVKASDELLLNEIYFQAKKLKQKASSELEKLESSKKLDEVIANSQLS

SEQ ID NO: 438 - protein, 878 aa, Francisella tularensis
MLNDLAGVLQVSRNQLLSSVEEWFQQAQRVGEISKSQDEQIFEWLKSFKIASYCKAAVEMQKQYRGTLKNAIQTAIFRQSENINKNKNKNKNTGNQQQALSENSKDVKSLTADEKKLLKLIENIAKASQKIGESLGLNDKQIKKFNSIYNFAQIQQIAFAERKGNANTCAVYSADNAHRMQQIKITELVEDNKDNIILSAKAQRLPAIPTRIVDGAVKKMATILAKNIVDDNWQNIKQVLSAKHQLHIPIITESNAFEFEPALADVKGKSLKDRRKKALERISPENIFKDKNNRIKEFAKGISAYSGANLTDGDFDGAKEELDHIIPRSYKKYGTLNDEVNLICVTRDDNKNKGKRIFCLNDLANNYKLKQFETTDDLEIEKKIADTIWDASKQDFKFGNYRSFINLIPQEQKAFRYALFLADENSIKQAVIRAINNRNRTFVNGTQRYFAEVLANNIYLRAKKENLNTDKISFDYFGIPTIGNGRGIADIRQLYEKVDSDIQAYAKGDKPQASYSHLIDAMIAFCVAADEHRNDGSIGLEIDKNYSLYPLDKNTGEVFTKDIFSQIKITDNEFSDKKLVRKKATEGFNTHRQMTRDGIYAENYLPILIHKELDEVRKGYTWGNSEELKIHKGKKYNIQQLNNIVYCLKFIDKSISIDIQISTLEELRNILTTNNIAATAEYYYINLKNQKLHEYYIENYNTALDYKKYSKEMEFLRSLAYRSERVKIKSIDDVKQVLDKDSNFIIGKITLPFKKEWQRLYLEWQNTTIKDDYEFLKSFFNVKSINKLHKKVRKDFSLPISTNEGKFLVKRKTWDNNFIYQILNDSDSRVDGTKPFIPAFDISKNEIVEAIIDSFTSKNIFWLPKNIELQKVDKIFLL

SEQ ID NO: 439 - protein, 292 aa, Francisella tularensis
MLNDLAGVLQVSRNQLLSSVEEWFQQAQRVGEISKSQDEQIFEWLKSFKIASYCKAAVEMQKQYRGTLKNAIQTAIFRQSENINKNKNKNTGNQQQALSENSKDVKSLTADEKKLLKLIENIAKASQKIGESLGLNDKQIKKFNSIYNFAQIQQIAFAERKGNANTCAVYSADNAHRMQQIKITELVEDNKDNIILSAKAQRLPAIPTRIVDGAVKKMVTILAKNIVDDNWQNIKQVLSAKHQLHIPIITESNAFEFEPALADVKGKSLKDRRKKALERISPENIFKDKNIC

SEQ ID NO: 440 - protein, 53 aa, Francisella tularensis
MNHSLLKSRYPDKVLEILKQSTIIEFESSGFNKTIKEMLGMTLAGIYNETSNN

SEQ ID NO: 441 - protein, 393 aa, Francisella tularensis
MNVKILPIAIDLDVKNTGVFSAFYQKGTSLEKLDNKNGKVYELSKDSYTLLMNNRTAQRHQRRGIDRKQLVKRLFKLVWTEQLNLEWDKDTQQAISFLFNRRGFSFITDGYSTEYLNIVPEQVKAILMDIFDDYNGEDDLDSYLKLATEQESKISEIYNKLMQKILEFKLRKLCTDIKDDKVSTKTLKEITSYEFELLADYLANYSESLKTQKFSYTDKQGNLKELSYYHHDKYNIQEFLKRHATINDEILDTLLTDDFDIWNFNFEKFDFDKNEEKLQNQEDKDHTQAYLHHFVFAVNKIKSEMASGGRHRSQYFQEITNVLDENNHQEGYLKNFCENLHNKKYSNLSVKNLVNLVGNLSNLELKPLRKYFNDKNLIIGMSKSLQKLIATGY

SEQ ID NO: 442 - protein, 1629 aa, Francisella tularensis
MNVKILPIAIDLGVKNTGVFSAFYQKGTSLERLDNKNGKVYELSKDSYTLLMNNRTARRHQRRGIDRKQLVKRLFKLIWTEQLNLEWDKDTQQAISFLFNRRGFSFITDGYSPEYLNIVPEQVKAILMDIFDDYNGEDDLDSYLKLATEQESKISEIYNKLMQKILEFKLRKLCTDIKDDKVSTKTLKEITSYEFELLADYLANYSEILKTQKFSYTDKQGNLKELSYYHHDKYNIQEFLKRHATINDEILDTLLTDDLDIWNFNFEKFDFDKNEEKLQNQEDKDHTQAHLHHFVFAVNKIKSEMASGGRHRGQYFQEITNVLDENNHQEGYLKNFCENLHNKKYSNLSVKNLVNLIGNLSNLELKPLRKYFNDKIHAKADHWDEQKFTETYCHWILGEWRVGVKDQDKKDGAKYSYKDLCNELKQKVTKAGLVDFLLELDPCRTIPPYLDNNNRKPPKCQSLILNPKFLDNQYPNWQQYLQELKKLQSIQNYLESFETDLKVLKSSKDQPYFVEYKSSNQQIASGQRDYKDLDARILQFIFDRVKASDELLLNEIYFQAKKLKQKASSELEKLESSKKLDEVIANSQLSQILKSQHTNGIFEQGTFLHLVCKYYKQRQRARDSRLYIMPEYRYDKKLDKYNNTGRFDDDNQLLTYCNHKPRQKRYQLLNDLAGVLQVSPNFLKDKIGSDDDLFISKWLVEHIRGFKKACEDSLKIQKDNRGLLNHKINIARNTKGKCEKEIFNLICKIEGSEDKKGNYKHGLAYELGVLLFGEPNEASKPEFDRKIKKFNSIYSFAQIQQIAFAERKGNANTCAVCSADNAHRMQQIKITEPVEDNKDKIILSAKAQRLPAIPTRIVDGAVKKMATILAKNIVDDNWQNIKQVLSAKHQLHIPIITESNAFEFEPALADVKGKSIKDRRKKALERISPENIFKDKNNRIKEFAKGISAYSGDNLASGDFDGAKEELDHIIPRSHKKYGTLNDEANLICVTRDDNKNKGNRIFCLHDLANNYKLKQFETTDDLEIEKKIADTIWDASKKDFKFGNYRSFINLTPQEQKAFRHALFLADENPIKQAVIRAINNRNRTFVNGTQRYFAEVLANNIYLRAKKENLNTDKISFDYFGIPTIGNGRGIVEIRQLYEKVDSDIQAYAKGDKPQASYSHLIDAMLAFCIAADEHRNDGSIGLEIDKNYSLYPLDKNTGEVFTKDIFSQIKITNNEFSDKKLVRKKATEGFNTHRQMTRDGIYAENYLPILIHKELDEVRKGYTWGNSEELKIHKGKKYDIQQLNNLVYCLKFIDKSISIDIQISTLEELRNILTTNNIATTAEYYYINLKTQKLHEYYIENYNTALGYKKYTKEMEFLRSLAYRSERVKIKSIDDVKQVLDKDSNFIIGKITLPFKKEWQRLYREWQNTTIKDDYEFLKSFFNVKSITKLHKKVRKDFSLPISTNEGKFLVKRKTWDNNFIYQILNDSDSRVDGTKPFIPAFDISKNEIVEAIIDSFTSKNIFWLPKNIELQKVDNKNIFAIDTSKWFEVETPSDLRDIGVATIQYKIDNNSRPKVRVKLDYVIDDDSKINYFTNHSLLKSRYPDKVLEILKQSTIIEFESSGFNKTIKEMLGMTLAGIYNETSNN

SEQ ID NO: 443 - protein, 285 aa, Francisella tularensis
MTRDGIYAENYLPILIHKELDEVRKGYTWGNSEELKIHKGKKYNIQQLNNIVYCLKFIDKSISIDIQISTLEELRNILTTNNIAATAEYYYINLKNQKLHEYYIENYNTALDYKKYSKEMEFLRSLAYRSERVKIKSIDDVKQVLDKDSNFIIGKITLPFKKEWQRLYLEWQNTTIKDDYEFLKSFFNVKSITKLHKKVRKDFSLPISTNEGKFLVKRKTWDNNFIYQILNDSDSRVDGTKPFIPAFDISKNEIVEAIIDSFTSKNIFWLPKNIELQKVDKIFLL

SEQ ID NO: 444 - protein, 1323 aa, Fructobacillus fructosus
MVYDVGLDIGTGSVGWVALDENGKLARAKGKNLVGVRLFDTAQTAADRRGFRTTRRRLSRRKWRLRLLDELFSAEINEIDSSFFQRLKYSYVHPKDEENKAHYYGGYLFPTEEETKKFHRSYPTIYHLRQELMAQPNKRFDIREIYLAIHHLVKYRGHFLSSQEKITIGSTYNPEDLANAIEVYADEKGLSWELNNPEQLTEIISGEAGYGLNKSMKADEALKLFEFDNNQDKVAIKTLLAGLTGNQIDFAKLFGKDISDKDEAKLWKLKLDDEALEEKSQTILSQLTDEEIELFHAVVQAYDGFVLIGLLNGADSVSAAMVQLYDQHREDRKLLKSLAQKAGLKHKRFSEIYEQLALATDEATIKNGISTARELVEESNLSKEVKEDTLRRLDENEFLPKQRTKANSVIPHQLHLAELQKILQNQGQYYPFLLDTFEKEDGQDNKIEELLRFRIPYYVGPLVTKKDVEHAGGDADNHWVERNEGFEKSRVTPWNFDKVFNRDKAARDFIERLTGNDTYLIGEKTLPQNSLRYQLFTVLNELNNVRVNGKKFDSKTKADLINDLFKARKTVSLSALKDYLKAQGKGDVTITGLADESKFNSSLSSYNDLKKTFDAEYLENEDNQETLEKIIEIQTVFEDSKIASRELSKLPLDDDQVKKLSQTHYTGWGRLSEKLLDSKIIDERGQKVSILDKLKSTSQNFMSIINNDKYGVQAWITEQNTGSSKLTFDEKVNELTTSPANKRGIKQSFAVLNDIKKAMKEEPRRVYLEFAREDQTSVRSVPRYNQLKEKYQSKSLSEEAKVLKKTLDGNKNKMSDDRYFLYFQQQGKDMYTGRPINFERLSQDYDIDHIIPQAFTKDDSLDNRVLVSRPENARKSDSFAYTDEVQKQDGSLWTSLLKSGFINRKKYERLTKAGKYLDGQKTGFIARQLVETRQIIKNVASLIEGEYENSKAVAIRSEITADMRLLVGIKKHREINSFHHAFDALLITAAGQYMQNRYPDRDSTNVYNEFDRYTNDYLKNLRQLSSRDEVRRLKSFGFVVGTMRKGNEDWSEENTSYLRKVMMFKNILTTKKTEKDRGPLNKETIFSPKSGKKLIPLNSKRSDTALYGGYSNVYSAYMTLVRANGKNLLIKIPISIANQIEVGNLKINDYIVNNPAIKKFEKILISKLPLGQLVNEDGNLIYLASNEYRHNAKQLWLSTTDADKIASISENSSDEELLEAYDILTSENVKNRFPFFKKDIDKLSQVRDEFLDSDKRIAVIQTILRGLQIDAAYQAPVKIISKKVSDWHKLQQSGGIKLSDNSEMIYQSATGIFETRVKISDLL

SEQ ID NO: 445 - protein, 1367 aa, Fusobacterium sp.
MKKQKFSDYYLGFDIGTNSVGWCVTDLDYNVLRFNKKDMWGSRLFDEAKTAAERRVQRNSRRRLKRRKWRLNLLEEIFSDEIMKIDSNFFRRLKESSLWLEDKNSKEKFTLFNDDNYKDYDFYKQYPTIFHLRDELIKNPEKKDIRLIYLALHSIFKSRGHFLFEGQNLKEIKNFETLYNNLISFLEDNGINKSIDKDNIKKLEKIICDSGKGLKDKEKEFKEIFNSDKQLVAIFKLSVGSSVSLNDLFDTDEYKKEEVEKEKISFREQIYEDDKPIYYSILGEKIELLDIAKSFYDFMVLNNILSDSNYISEAKVKLYEEHKKDLKNLKYIIRKYNKENYDKLFKDKNENNYPAYIGLNKEKGKKEVVEKSGLKIDDLIKVIKGYLPKPERIEEKDKTIFNEILNKIELKTILPKQRISDNGTLPYQIHEVELEKILENQSKYYDFLNYEENGVSTKDKLLKTFKFRIPYYVGPLNSYHKDKGGNSWIVRKEEGKILPWNFEQKVDIEKSAEEFIKRMTNKCTYLNGEDVIPKDSFLYSEYIILNELNKVQVNDEFLNEENKRKIIDELFKENKKVSEKKFKEYLLVNQIANRTVELKGIKDSFNSNYVSYIKFKDIFGEKLNLDIYKEISEKSILWKCLYGDDKKIFEKKIKNEYGDILNKDEIKKINSFKFNTWGRLSEKLLTGIEFINLETGECYSSVMEALRRTNYNLMELLSSKFTLQESIDNGNKEMNEVSYRDLIEESYVSPSLKRAILQTLKIYEEIKKITGRVPKKVFIEMARGGDETMKNKKIPARQEQLKKLYDSCGNDIANFSIDIKKMKSSLSSYDNNSLRQKKLYLYYLQFGKCMYTGREIDLDRLLQNNDTYDIDHIYPRSKVIKDDSFDNLVLVLKNENAEKSNEYPVKKEIQEKMKSFWRFLKEKNFISDEKYKRLTGKDDFELRGFMARQLVNVRQTTKEVGKILQQIEPEIKIVYSKAEIASSFREMFDFIKVRELNDTHHAKDAYLNIVAGNVYNTKFTEKPYRYLQEIKENYDVKKIYNYDIKNAWDKENSLEIVKKNMKKNTVNITRFIKEEKGQLFDLNPIKKGETSNEIISIKPKLYNGKEEKLNEKYGYYKSLNPAYFLYVEHKEKNKRIKSFERVNLVDVNNIKDEKSLVKYLIENKKLVEPRLIKKVYKRQVILINDYPYSIVALDSNKLMDFENLKPLFLENKYEKILKNVIKFLEDNQGKSEENYKFIYLKKKDRYEKNETLESVKDRYNLEFNEMYDKFLEKLDSKDYKNYINNKKYKNLLDVKEKFIKLNLFDKAFTLKSFLDLFNRKTMADFSKVGLTKYLGKIQKISSNVLSKNELYLLEESVTGLFVKKIKL

SEQ ID NO: 446 - protein, 1367 aa, Fusobacterium sp.
MKKQKFSDYYLGFDIGTNSVGWCVTDLDYNVLRFNKKDMWGSRLFDEAKTAAERRVQRNSRRRLKRRKWRLNLLEEIFSDEIMKIDSNFFRRLKESSLWLEDKNSKEKFTLFNDDNYKDYDFYKQYPTIFHLRDELIKNPEKKDIRLIYLALHSIFKSRGHFLFEGQNLKEIKNFETLYNNLISFLEDNGINKSIDKDNIKKLEKIICDSGKGLKDKEKEFKEIFNSDKQLVAIFKLSVGSSVSLNDLFDTDEYKKEEVEKEKISFREQIYEDDKPIYYSILGEKIELLDIAKSFYDFMVLNNILSDSNYISEAKVKLYEEHKKDLKNLKYIIRKYNKENYDKLFKDKNENNYPAYIGLNKEKGKKEVVEKSGLKIDDLIKVIKGYLPKPERIEEKDKIIFNEILNKIELKTILPKQRISDNGTLPYQIHEVELEKILENQSKYYDFLNYEENGVSTKDKLLKTFKFRIPYYVGPLNSYHKDKGGNSWIVRKEEGKILPWNFEQKVDIEKSAEEFIKRMTNKCTYLNGEDVIPKDSFLYSEYIILNELNKVQVNDEFLNEENKRKIIDELFKENKKVSEKKFKEYLLVNQIANRTVELKGIKDSFNSNYVSYIKFKDIFGEKLNLDIYKEISEKSILWKCLYGDDKKIFEKKIKNEYGDILNKDEIKKINSFKFNTWGRLSEKLLTGIEFINLETGECYSSVMEALRRTNYNLMELLSSKFTLQESIDNGNKEMNEVSYRDLIEESYVSPSLKRAILQTLKIYEEIKKITGRVPKKVFIEMARGGDETMKNKKIPARQEQLKKLYDSCGNDIANFSIDIKKMKSSLSSYDNNSLRQKKLYLYYLQFGKCMYTGREIDLDRLLQNNDTYDIDHIYPRSKVIKDDSFDNLVLVLKNENAEKSNEYPVKKEIQEKMKSFWRFLKEKNFISDEKYKRLTGKDDFELRGFMARQLVNVRQTTKEVGKILQQIEPEIKIVYSKAEIASSFREMFDFIKVRELNDTHHAKDAYLNIVAGNVYNTKFTEKPYRYLQEIKENYDVKKIYNYDIKNAWDKENSLEIVKKNMKKNTVNITRFIKEEKGQLFDLNPIKKGETSNEIISIKPKLYNGKEEKLNEKYGYYKSLNPAYFLYVEHKEKNKRIKSFERVNLVDVNNIKDEKSLVKYLIENKKLVEPRLIKKVYKRQVILINDYPYSIVALDSNKLMDFENLKPLFLENKYEKILKNVIKFLEDNQGKSEENYKFIYLKKKDRYEKNETLESVKDRYNLEFNEMYDKFLEKLDSKDYKNYINNKKYKNLLDVKEKFIKLNLFDKAFTLKSFLDLFNRKTMADFSKVGLTKYLGKIQKISSNVLSKNELYLLEESVTGLFVKKIKL

SEQ ID NO: 447 - protein, 1367 aa, Fusobacterium sp.
MKKQQFSDYYLGFDIGTNSVGWCVTDFNYNVLRFNKKDMWGSRLFDEAKTAAERRVQRNSRRRLKRRKWRLNLLEEIFSDEILKIDSNFFRRLKESSLWLEDKSSKEKFTLFNDDNYKDYDFYKQYPTIFHLRNELIKNPEKKDIRLVYLALHSIFKSRGHFLFEGQNLKDIKNFETLYNNLMAFLEDNDIYKNIDSSYIGNLENIICDSKKGLKDKEKEFKEIFNSDKQLVGFFKLSVGSSVSLNDLFDTDEYKKGEVEKEKISFREQIYEDDKPIYYSILGEKIEFLDIAKSFYDFMVLNNILADSQYISEAKVKLYDEHKRDLKNLKYIIRKYNKENYDKLFKDKNESNYSAYIGLNKEKGKKEVIEKSRLKIDDFAKIIKGYLPKAEKIDEKDRSIFNEILDKIELKTILPKQRISDNGTLPYQIHEAELEKILENQAKYYDFLNHEENGISTKDKLLMTFKFRIPYYVGPLNSYHKNKGGNSWIVRKEEGKILPWNFEQKVDIEKSAEEFIKRMTNKCTYLNGEDVIPKDSFLYSEYIILNELNKVQVNDEFLNKEIKKKIIEDLFKKSKKISEKNFREYLLVNQITNKTVELKGVKDAFNSNYVSYIKFKDIFGDKLNLDIYKEISEKSILWKCLYGDDKKIFEKKIKSVYGDILTKDEIKKINSFKFNTWGRLSEKLLTEIEFIDLETGECYSSVMDALRRTNYNLMELLSSKFTLQENIDNENKEVSEFSYRDLVEESYVSPSLKRAILQTLKIYEEIRKITGRIPKKVFIEMARGGDETMKNKKIPARQEQLKKLYDSCGKDISNFSIDIKEMKNSLNSYDNNSLRQKKLYLYYLQFGKCMYTGKEIDLNRLLQNNDTYDIDHIYPRSKVIKDDSFDNLVLVLKNENAEKSNEYPLKKEIQEKMKSFWKFLKEKNFISDEKYKRLTGKDEFELRGFMARQLVNVRQTTKEAGKILQQIEPEIKIVYSKAEIASSFREMFDFIKVRELNDTHHAKDAYLNIVAGNVYNTKFTEKPYRYLQEIKENYDVKKIYNYDIKNAWDKEKSLEIVKKNMEKNTVNITRFIKEEKGQLFDLNPIRKGETSNEIIAIKPKFYEGSTEKLNEKYGYYKSLNPAYFIYVEHKEKNKIIRSFERVNLVDVNKIKDEKSLIKYLIENKGLIEPKVIKKVYKRQVILINNFPYSIVALDSNKLMDFENLKPLFLERKYEKILKNAIKFLEDNQGKTEEYYKFLYLKKKDRNEKNETIDSVKERYNIEFNEMYDKFLEKLDSKDYKNYINNKKYSELVNVKEKFIKLNLFDKAFTLKSFLDLFNRKTMADFSKVGLTKYLGKIQKISSNVLSKNELHLLEESVTGLFVKKIKL

SEQ ID NO: 448 - protein, 1391 aa, Galbibacter sp.
MKTILGLDLGTNSIGWALVKEAENENEVSDIIKLGVRVNPLTVDELTNFEGGKAYSNNAERTLKRGARRNLQRYKLRRENLIEILLKNGLINKDTALTEVGKETTHQTLKLRSKSANEKVSLEDLAKILLSINKKRGYKSSRKVNAEDDGVAIDGMEVAKLLYDENMTPGEYVLRLLESGKKHLPDFYRSDLQEEFNLVWKKQSEFYPLILTKELFFELHGKNKSQTWAICKEPLGIVGVKLKGSAKEQKFARYRLRKEALTQQIELEHLAIVLQDINNDSNKSSGYLGAISDRSKELFFNKETVGQYQYKQLQKDPNTSLKNQVFYRQDYLDEFEVIWRNQAKFYPQLTNELKQEIRDVVIFYQRKLKSQKNLISFCQFESTQQNYVEKETGKTKIRTIGRRVIPRSSPLFQEFKIWQSLNNLKFVNSESNQIIQFIELEDDVKKVVFDELNLRGDLKPNQVLKILSKYMKIGKLTQWKCNLEEIEGNRTNSALYNVFQMIAEEEGYGFNWGKKSALEIKSELKAIFSSIGINDSILDFDFSKKLDQQLSYQLWHLLYSAEEGNSKITEEDKFTYGNTGVALKKKLHLKFGFKPEYSTLISNLRFTSDYGNLSSKAISKILPFLRDGSDYSKACQYAGYNHSNSLSADELDNRELKPKLELLKKNSLRNPVVEKILNQMVNVVNQVIDNYGKPDEVRIELARELKKSAKERSQMTKNISDATRRNAEIKKYLSKEFGIPNPTKGDVIRYRLWEELASNGYKDLFRDKYIPKEKLFSNEIDIEHIIPKALLFDDSFSNKTLAFKVDNLKKADRTAFDFMSTDFSKDVDSYIGRIETLHKDGKISSSKYKKLMIPKSKLVDGFIERDLRNTQYIAKQARKMLLEVFKTVVPTTGKITDKLREDWDLINVMKELNFPKYKALGLTKKIERFDVGSEKIKSINVIEGWSKRNDHRHHAMDALAVAFTTHNHIQYLNYLNARKDIHHEMHGTIKSIENQIIGKDVMGKRRFIPPISDLRMKAKLQIESILISFKNKNKVVTWSVNKTKLKGKDNYNKRRQLTPRGQLHKETVYGKIKLIDPKPLKLNNKFTLVRASMIVDKVHREIVLQHLSKYDNNSEVAFDSKTIKIDPILIEGIGLKEVVCYEDVFKIRKKISGDNFKNEKHLEKVIDEKVKQILKDRVIKFQGNFKEAFSNLEENPIWLNKSKGIAVKSVAIKGVNNAESLHEGKDHFGDQILDKNKKQIPVDFVSTGNNHHVGIYEDKDGNLQERVVSFFEAVTRVNEGLPIIDKTYNSDIGWKFKFTMKQNEMFVFPSDDFDPNEFDLTDGKNAAKISPNLYRVQKIATKNYMFRHHLETVVTNDLEFTYKSIRSTGWLRNLVKVRINHLGEIVYVGEY

SEQ ID NO: 449 - protein, 1186 aa, Gardnerella vaginalis
MEGNISYAIGIDVGLNSVGLAAIRLDDYGEPIRILKAMSVIHDAGIDPNGAKESDTRKAISGVARRVRRLYRQRRRRLQKLDFLLQSLGWPVVENKDLDFSDSFIPWIFRAKLADEYIADEEQRKQMLSVAIRHIARHRGWRNPYQSIKSMMQETEYSEFYNELLKNIEKLAPGVGCEGSTPAQLVRDYLLSQQGKASRRLRITTGGRRKNHPHSLDPVLPRKLMQSDNMLEILNIFNVQHIDDKYVREQIINAVFYAESPRGSAENRVGKDAITGKGKRALKASLAFQKYRIISTISNLRIRENSKERCLTIEEKQNVYKLLTTSIDKSSKRKSAEAPLYTWIDVADCLGIERYKLRGVGSQIGDGESVGNRPPMLNSELAILYANNKSLGQSLITWWLASNRTQEDKEALIEILSNTVDIEAIHDNPEYQDKYGSAIAFIDSMNETEIAALENISLPDGRAAYSLETLDELNKQMLETDDDLFEARKKLFNLPNNWRPAEAPIAEPTGNPSVDRVLKIVHRFLISAKNRWGNPERINIEHVRSGFQSKKMANSYKELLDKRTEGKENLKAMMRNSLHLGTSDSISDADIRRYEAVQRQNGQCLYCGSEITYHTCELDHIVPRKGPGSTNTRENLVATCSSCNAQKCNTPFATWCEQSTYCKNHDISADSAINRVRAFIFPPNSYDKRGANQFKKEVIARLKQKVGDEAFDNRSIESVAWMANELHRRIDWYYNSQNYQTNNGISDISNKAQTNVGVYAGSLTAIARRMSGIDGKLEFFDGRRKTRFDRRHHAVDASVIAMMTPGIAQILAIKCNLRETQLLQGNKVVPGGIDWKEYPTANDQGYQQYANWSVRMNALLKLLNEEMRADRIAVVNSIRLRYSNSSVHQYEVNALLKLHVGDEIDSETIRRSSTPALYCALTRNPDYDVNNGFPENPGRTILLHNKKLNADDSITFFKAQAVQLFVREGSAKIGNSIHHLRIYEYFEKLKSGKIKKSYGMIRVFQNDLHRHIHEDLFSCDLPEQSISMRYADTKVAHAVQTGNANYLGYLVPGDEIIVDFSHITLSENIGKFVEFLNKIGADCTAYRHWVVVGTDTEKVLILKPSMISSEGIDKLYSNCERNNFDYSSYEKSINEILAGKGWRVSVNVLAQYKAATIRRNALGEVRWASRSHLPISWSWDTGENRE

SEQ ID NO: 450 - protein, 1186 aa, Gardnerella vaginalis
MEGNISYAIGIDVGLNSVGLAAIRLDNNGEPIRILKAMSVIHDAGIDPNGAKESDTRKAISGVARRVRRLYRQRRRRLQKLDFLLHSLGFPVVENKDLDFSDSFIPWIFRAKLADEYIADEKQRKQMLSVAIRHIARHRGWRNPYQSIKSMTQETEYSEFYNELLKNIEKFAPGVGCEGSTPAQLVRDYLLLQQGKASRRLRITTDEKRKNHPNSLNPILPRKLMQSDNMLEILNIFNVQHIDDKYVREQIINAVFYAKSPRGSAENRVGKDAITGKGKRALKASLAFQKYRIISTISNLRIRENSKERCLTIEEKQSVYKLLTTSTDESSKEKSAEAPLYTWIDVADCLGIERYKLRGVGSQIGDGESVGNRPPMLNSELAIIYANNKSLGKSLLTWWLDANRTQEDKEALIEILSNTVDIEAIHDNPEYQDKYGSAIAFIDSMDETEIAALENISLPDGRAAYSLETLDKLNKQMLETDDDLFEARKKLFNLPNNWRPSEAPIAEPTGNPSVDRVLKIVHRFLISAKNRWGNPERINIEHVRSGFKSKKMANSYKELLDKRTKGKENLKAMMRNSLHLGMSDSISDADIRRYEAVQRQNGQCLYCGSEITYHTCELDHIVPRKGPGSTNTRENLVATCSLCNAQKCNTPFSTWCEQSTYCKNHDISVDSAINRVRAFIFPPNSYDKRGANQFKKEVIARLKQKVGDEAFDNRSIESVAWMANELHRRIDWYYNSQNYQTNNGISDITNKAQTNVGVYAGSLTAIARRMSGIDGKLEFFDGRRKTRFDRRHHAVDASVIAMMTPGIAQILAIKCNLRETQLLQGNKVVPGGIDWKEYPTANDQGYQQYANWSVRMNALLKLLNEEMRADRIAVVNSIRLRYNNSSVHQYKVNALLKLHVGDEIDSGTIRRSSTPALYCALTRNPDYDVNNGLPENPNRAILLHDKKLNADDSITFFKAQAVQLFVREGSAEIGSSTHHLRIYEYFKKLKSGKIKKSYGMIRVFQNDLHRHIHEDLFSCDLPEQSISMRYADTEVAHAVQTGNSNYLGYLVPGDEIIVDFSHVKLSGNIGTFVEFLNKIGANCAAYNHWVVVGTDTEKVLILKPSMISSEGIDKLYSNCKRNNFDYSSYEKSINEILVGKGWRVSVNVLAKYNAETIRRNALGEVRWTSRSHLPISWSWNTGENRE

SEQ ID NO: 451 - protein, 1258 aa, Gemella haemolysans
MTEENPDIRKVFLAIHHILKNRGHFLLQGQSFKEGNLNNLIKELLNLDILHISIEITEENINKITEIALEKKTLTDKVNDLKKIYPKEKQLLEAFRLIFGGKTSLDKLFAIDEYKELDASVKSVSFKEKIYEEVRHDYEQVLSNYIELLDLAKLVYDSIILSDIKKEGKTLSESKVELYHKHREDLTKLKTLVKNDSKLSEDKKVELYSAIFKEDKDKGTNYVNYIRKSEEGKGCNYEDFKKFLVKELAKLEESSAKEEILRDLELELFLPLQRTKDNSVVPYQIHKEELVKILDNAAKYHKFLNEKDDSGYSIIEKVIQLLEFRIPYYVGPLNSSKKAKVDGFAWSVRNKGYENTPVTPWNYEKVIDESASAEKFITNLTNKCTYLKGEDVLPKSSLLYSEFALLNELNALKYDGNRISLEARNVIIEKLFKEQGKKVTKTSIKNLLKAEGYIDGKGEITGIDITVKNDLKSYRDFKKILGDKFNTEHVENIILWITLYGESRKLIKAKIEAVYGDIYSKEEIAKMSRLVYKDWGRFSRKLLTELVSKKLYNEETGECLNIIGAMRQNNILFMELLADRFDYSQQIIDYNKELQKEVTEITPEILDDLYVSPSVKRSIWQTVRIVEELKKIIGCAPAKIFVETTRSNQDKKKPTDSRKKQLELFYKAVKKDVKDLEKEIGSLNFDKLNERLSSVEPSKLKAKKLYLYYTQLGRCMYSGETIDITQLNTTAYDIDHIYPQSKVKDDSFTNTVLVKREYNAAKTDRYPLGSDIQTPSNRRFWKFLKEKGLITDEKYNRLVRTEEFSDEELTGFIARQLVETSQSVKAVAGILGELNPKTSICYSKAENVSSFRQNFGKIKEGNRKSDNTEQLIKVREINDYHHAKDAYLNVVVGNVYDTKFTRNVFNFIKDKKDGRKYSLNNVFYENVSNSNNVAWELNKTVHQVEKVMNNNNILVTRRTSEQKGGLFDATVYKAKVAAKAKEGVYYPLKTSDPVVNDVTKYGGFTKVKIAYYSIFEYTLVNKKGEEKITRIIPIPIYVSQNIKDDSTLLEFGKTQINIKSGEEVKDFKLKYRKLCIGDLVKINNFFNFIGGKTNDSFVYDGAVQVTLDTESERYIKTLSKYQNWKKENKDGELWESITKEKNTELYNLLVEKMNSGIFIKKKPNKFNELNSEEIRNNFSSISLEEQAKVLLEVLNLLTNKKSIFDLKSINITAARGKISFNLSNLSQFSIIEQSVAGFYEKEITIIGDKENDMENNNC

SEQ ID NO: 452 - protein, 1054 aa, Haemophilus parainfluenzae
MENKNLNYILGLDLGIASVGWAVVEIDEKENPLRLIDVGVRTFERAEVPKTGESLALSRRLARSARRLTQRRVARLKKAKRLLKSENILLSTDERLPHQVWQLRVEGLDHKLERQEWAAVLLHLIKHRGYLSQRKNESKSENKELGALLSGVDNNHKLLQQATYRSPAELAVKKFEVEEGHIRNQQGAYTHTFSRLDLLAEMELLFSRQQHFGNPFASEKLLENLTALLMWQKPALSGEAILKMLGKCTFEDEYKAAKNTYSAERFVWITKLNNLRIQENGLERALNDNERLALMEQPYDKNRLFYSQVRSILKLSDEAIFKGLRYSGEDKKAIETKAVLMEMKAYHQIRKVLEGNNLKAEWAELKANPTLLDEIGTAFSLYKTDEDISAYLAGKLSQPVLNALLENLSFDKFIQLSLKALYKLLPLMQQGLRYDEACREIYGDHYGKKTEENHHFLPQIPADEIRNPVVLRTLTQARKVINGVVRLYGSPARIHIETGREVGKSYKDRRELEKRQEENRKQRENAIKEFKEYFPHFAGEPKAKDILKMRLYKQQNAKCLYSGKPIELHRLLEKGYVEVDHALPFSRTWDDSFNNKVLVLANENQNKGNLTPFEWLDGKHNSERWRAFKALVETSAFPYAKKQRILSQKLDEKGFIERNLNDTRYVARFLCNFIADNMHLTGEGKRKVFASNGQITALLRSRWGLAKSREDNDRHHALDAVVVACSTVAMQQKITRFVRFEAGDVFTGERIDRETGEIIPLHFPTPWQFFKQEVEIRIFSDNPKLELENRLPDRPQANHEFVQPLFVSRMPTRKMTGQGHMETVKSAKRLNEGISVIKMPLTKLKLKDLELMVNREREKDLYDTLKARLEAFNDDPAKAFAEPFIKKGGAIVKSVRVEQIQKSGVLVREGNGVADNASMVRVDVFTKGGKYFLVPIYTWQVAKGILPNKAATQYKDEEDWEVMDNSATFKFSLHPNDLVKLVTKKKTILGYFNGLNRATGNIDIKEHDLDKSKGKQGIFEGVGIKLALSFEKYQVDELGKNIRLCKPSKRQPVR

SEQ ID NO: 453 - protein, 1052 aa, Haemophilus parainfluenzae]
MKNTSLNYVLGLDLGISSVGWAVVEIDEKENPLSLIDVGVRTFERAETQKGESLALARRLARSARRLTQRRVARLKKAKRLLKSENILLSTDECLPHQVWQLRVEGLERKLERQEWAAVLLHLIKHRGYLSQRKNESKSENKELGALLSGVANNHKLLQQTTYRTPAELAVKKFEVEEGHIRNQQGSYTHTFSRLDLLSEMELLFSRQQHFGNPFTSEKLLENLTALLMWQKPALSGDAILKMLGKCTFENEYKAAKHTYSAERFIWITKLNNLRIQENGLERALNDNERLALMKQPYEKAKLTYAQVRSILNLSDEAIFKGLRYSGEDKKTSETKTVLMEMKAYHQIRLALEKNDLKTEWAELKVNSSLLDEIGTAFSLYKTDEDISTCLAGKLSQPVLNALLENLNFDKFIQLSLKALHKILPLMQQGLRYDEACAEIYGDHYGKKTEENHLLLPQIPADEIRNPVVLRTLTQARKVINGVVRLYSSPARIHIETGREVGKSYQDRRELEKRQEENRKQREKAISEIKTLFPNFSGEPKAKDILKMRLYYQQNAKCLYSGKPLELHRLLEQGYVEIDHALPFSRTWDDSFNNKVLVLANENQNKGNLTPFEWLDGKNNSERWKAFKALVETSAFPYTKKQRILSQKLDEKGFIERNLNDTRYVARFLCNFIADNMHLTGEGKRKVFASNGQITALLRGRWGLAKSREDNDRHHALDAVVVACSTVSMQQKITRFVRFEEGNVFTGERIDRETGEIIPLHFPAPWKFFREEVEIRIFSDNPKLELENRLIARPQANHEFVQPLFVSRMPTRKMIGQGHMETIKSAKRLNEGLSVIKMLLTKLRLKDLESMVNREREKELYEALKARLEAFNDEPAKAFAEPFMKKGGAIVKSVRVEQVQKSGVLVRDGNGVADNASMVRVDVFTKGGKYFLVPIYTWQVAKGILPNKAVIQGKNEEDWEVMDDATFRFSLHQNDLVKLVTKKKTIFGYFNGLNRATGNIDIKEHDLEKSKVKDGIHQSIGIKLALSFEKYQVDELGKNIRLCKSSKRQAVR

SEQ ID NO: 454 - protein, 121 aa, Haemophilus pittmaniae
MLNRRYAAKITRFVRFEAGDVFTGERIDRETGEIIPLHFPTPWQFFKQEVEIRIFSDNPKLELENRLPDRPQANHEFVQPLFVSRMPTRKMTGQGHMETVKSAKRLNEGISVIKMPLTKLN

SEQ ID NO: 455 - protein, 203 aa, Haemophilus pittmaniae
MVNREREKDLYDALKARLEAFNDDPAKAFAEPFIKKGGAIVKSVRVEQVQKSGVLVREGNGVADNASMVRVDVFTKDGKYFLVPIYTWQVAKGILPNKAATQYKDEEDWEVMDNSAIFKFSLHPNDLVKLVTKKKTILGYFNGLDRATGNIAIKEHDLEKSKAKGGIHQGVGIKLALSFEKYQIDELGKNIRLCNPSKCQSVR

SEQ ID NO: 456 - protein, 1052 aa, Haemophilus sputorum
MKNTSLNYVLGLDLGISSVGWAVVEIDEKENPLSLIDVGVRTFERAETQKGESLALARRLARSARRLTQRRVARLKKAKRLLKSENILLSTDECLPHQVWQLRVEGLERKLERQEWAAVLLHLIKHRGYLSQRKNESKSENKELGALLSGVANNHKLLQQTTYRTPAELAVKKFEVEEGHIRNQQGSYTHTFSRLDLLSEMELLFSRQQHFGNPFTSEKLLENLTALLMWQKPALSGDAILKMLGKCTFENEYKAAKHTYSAERFIWITKLNNLRIQENGLERALNDNERLALMKQPYEKAKLTYAQVRSILNLSDEAIFKGLRYSGEDKKTSETKTVLMEMKAYHQIRLALEKNDLKTEWAELKVNSSLLDEIGTAFSLYKTDEDISTCLAGKLSQPVLNALLENLNFDKFIQLSLKALHKILPLMQQGLRYDEACAEIYGDHYGKKTEENHLLLPQIPADEIRNPVVLRTLTQARKVINGVVRLYSSPARIHIETGREVGKSYQDRRELEKRQEENRKQREKAISEIKTLFPNFSGEPKAKDILKMRLYYQQNAKCLYSGKPLELHRLLEQGYVEIDHALPFSRTWDDSFNNKVLVLANENQNKGNLTPFEWLDGKNNSERWKAFKALVETSAFPYTKKQRILSQKLDEKGFIERNLNDTRYVARFLCNFIADNMHLTGEGKRKVFASNGQITALLRGRWGLAKSREDNDRHHALDAVVVACSTVSMQQKITRFVRFEEGNVFTGERIDRETGEIIPLHFPAPWKFFREEVEIRIFSDNPKLELENRLIARPQANHEFVQPLFVSRMPTRKMTGQGHMETIKSAKRLNEGLSVIKMLLTKLRLKDLESMVNREREKELYEALKARLEAFNDEPAKAFAEPFMKKGGAIVKSVRVEQVQKSGVLVRDGNGVADNASMVRVDVFTKGGKYFLVPIYTWQVAKGILPNKAVIQGKNEEDWEVMDDATFRFSLHQNDLVKLVTKKKTIFGYFNGLNRATGNIDIKEHDLEKSKVKDGIHQSIGIKLALSFEKYQVDELGKNIRLCKSSKRQAVR

SEQ ID NO: 457 - protein, 1338 aa, Helcococcus kunzii
MQDYYLGLDIGTNSVGWAVTDENYNLLRKKGKDLWGVRLFKEAQPATERRGHRSSRRRTIRKSLRKQLLRELFEEEINAIDKDFFLRLDESKYWLEDKKIEGKYSLFNDENFTDKDYYEKFPTIFHLRKALIESDDKEDIRLYFLAINQMMKRRGHFLIDGKLSNVEDITPFKECIQNLINEELDTEIETEFYDKAIKIVSDYSLKKTEKKNLIKDLVKETDSIEDSKKIINIFNLLISGKSKVNGIFDDEEILEKIKEDNKEDFYLTSEKYEENLEYFSQLLDYRFELISSLKSIYDYIILQEVLKGKKYLSYAQVERYKNHKEDLRKLKQLIKKYDKNGKIYYQIFRDENFKKGYVAYLGYYKKNKKNVPVKKCDYDTFSKNIKSTLDKICDKEDPLYIELIDKIEKGGFLLKQIVSTNSVIPHQVHELELDKILENLEKNYPSFKEISDGVSKIDKIKMIFNFRIPYYVGPLNDYHKDKVNSNTWIVKNEGFENENIRPWNFSKIVDEHACEEEFIKRMINECSYIPGEKVLPKSSLLYSEYMVLNELNNLRVNGDKLNPKIKKEIVENIYKKERKVTLKKIRNFLIINNYVDSKVEFSGLSDGIKANMSSYIDFAEILDDNFDNNMVEDLIEQITIHVGNVKLLTEKISNKYPNLEKKQINKIVNLKFKDWARFSRKLLVGIEGTEKETGEINTIIGFLRETNENFMELMSNRYTFSEEISEIKKKYIPNKLSKQIVDDLYVSPAVKKMIWQVLNINDELIKVLGKQPKKIFIEMARGKEEKPEVKDSRKNKLIELYKNLGKEGKEWLNRIEDKTEADFRNRALYLYYTQMGRCMYTGEIIDIERLYDKELYDLDHIIPRKMKKDDSIHKNLVLVTRNSNQYEKKDNYPVPEVIKSRENVRHLWYALKKKGLITEEKYNRLTRINPLSDKELSEFIERQLVETRQTTKVVKDLFENYYTDSKIVTVKAGLVSELRRDFEVLKCREINDLNHAHDAFLNIIVGDVWSKKFTSNPYNFVKKNREKYTLNNIFTKNQKDLRGNEIWNCAEGKKRIIKTLNKPSVLFSVENFEQTGQLFDQNIIGKQDYKEKTSYVPIKGDERLQDISKYGGYRGISGAYFFIVEHTEKNKRVKTIESLPIYMKSYVEENGLLDFCTNEMKLVDPKIIVKKLNYKSEIIVDGFKYLISGKTENRLSLETNEYLYWNHTQTTDIKKILNINEKIELEKYNGDIESERENIIKYIQIILEKFKLKPFIKRRNLPNIEINFADYETEKLLQLLVNLIPLTTKYVSPVDLTVISGSKYAGKVLIPKKISNLNEVIFISKSITGIYESRRRII

SEQ ID NO: 458 - protein, 1023 aa, Helicobacter cinaedi
MKIYSFDIGVASIGWAFIENEVLQDCGIRIFTKAENPKNGASLALPRREARGVRKRLARRRGRLNTIKQLLCKEFGLQLEDYLSNDGELPKAYTASKANPLKSPYELRTLALSQKLDSKDLVRVILHIAKHRGYGNKHAKDSKDTESGKVKKAIEFNRKTLAEKGYRSVGEYLYREFFQQSRISQNNGATEFINVRNKAGNYEHCVAQDMLKEELESILNAQRQFGFSLKQDFENKLLTKIFEQRPLKSFADKVGNCCFIAGEKRTPKDSLSAIEFIALSRTINTLINLSKESGEIYNRAIILQIVESTLKKGEISYKELREIIRLDERLRFKDPRLDYSREIKEAEKVKFLEFKQLKGFKKALGESFTTLARSQLDEIAEHIALIKDRVKLNEKLESYALTKEQREALSNLSFSAHINLSLQALKQILPFMRGDNGEQCLDYDESVEKAGLKALSKDTLKGQMLPPLNEFEPYLSNPVVARALAEYRKVLNALLKQYGSPHKIHIEYAREAKLSSTERQKYEKEQKDNYAANQAAHKKCQELGLEPSSTNLLKLKLWQEQGGLCLYSGAKITISYLQDPTALQVDHIYPYSRSFDDSYMNKCLVLTKANQEKGNRTPFEAFGTDSAKWGVITTLAQKLPHKKRRRILNTAFNDKEAGFKLRNLNDTSYIARLVADYTETYLEFLPLVESENTTLGKGQKGSKKHIAIVNGALTSTMRYYLGFASKDRDNHLHHALDAVIIGFMNDSVIKAFSDFKKTQETSKAAYYAHTLSKQEYKKQRAFIQLPSGENFRASVLEKVESVFVSKPPRKRVRGALHEATFYSPNDPKLLKNYGGTKGVERALALGKMRKVGAKIVSNGAMVRVDIFRHKSSGKFYGVPVYTMDFALGILPNKAVVVGKDKNGVIKDWLEMDSSYEFIFSLYKDDLLLVQKKEMAEPELCYFMSFNSSIAQISVAKHDNNFSTLTKNQKLLFSNATQEDVSGKSIGIQNLQVFEKWQVSVLGEVKRTQSYPRENISLASKAKK

SEQ ID NO: 459 - protein, 1023 aa, Helicobacter cinaedi
MKIYSFDIGVASIGWAFIENEVLQDCGIRIFTKAENPKNGASLALPRREARGVRKRLARRRGRLNTIKQLLCKEFGLQLEDYLSNDGELPKAYTASKANPLKSPYELRTLALSQKLDSKDLVRVILHIAKHRGYGNKHAKDSKDTESGKVKKAIEFNRKTLAEKGYRSVGEYLYREFFQQSRISQNNGATEFINVRNKAGNYEHCVAQDMLKEELESILNAQRQFGFSLKQDFESKLLTKIFEQRPLKSFADKVGNCCFIAGEKRAPKDSPSAIEFIALSRTINTLINLSKESGEIYNRAIILQIVESTLKKGEISYKELREIIRLDERLRFKDPRLDYSREIKEAEKVKFLEFKQLKGFKKALGESFTTLAISQLDEIAEHIALIKDRVKLNEKLESYALTKEQREALSNLSFSAHINLSLQALKQILPFMRGDNGEQCLDYDESVEKAGLKALSKDTLKGQMLPPLNEFEPYLSNPVVARALAEYRKVLNVLLKQYGSPHKIHIEYAREAKLSSTERQKYEKEQKDNYAANQAAHKKCQELGLEPSSTNLLKLKLWQEQGGLCLYSGAKITISYLQDPTALQVDHIYPYSRSFDDSYMNKCLVLTKANQEKGNRTPFEAFGTDSAKWGVITTLAQKLPHKKRRRILNTAFNDKEAGFKLRNLNDTSYIARLVADYTETYLEFLPLVESENTTLSKGQKGSKKHIAIVNGVLTSTMRYYLGFASKDRDNHLHHALDAVIIGFMNDSVIKAFSDFKKTQETSKAAYYAHTLSKQEYKKQRAFIQLPSGENFRVSVLEKVESVFVSKPPRKRVRGALHEATFYSPNDPKLLKNYGGTKGVERALALGKMRKVGAKIVSNGAMVRVDIFRHKSSGKFYGVPVYTMDFALGILPNKAVVVGKDQNGVIKDWLEMDSSYEFIFSLYKDDVILVQKKEMQRPELCYFVSFDTSGASIKVAKHDNNFSTLTENQKLLFSNATKEEVVGKSIGIQNLKVFEKWQVSVLGEVKRTQSYPRENISLASKAKK

SEQ ID NO: 460 - protein, 344 aa, Helicobacter pullorum
MKILGFDIGIASIGWAFVENGELKDCGVRIFTKAENPKTGDSLAMPRREARSVRRRLARRKGRLETLKRLLAKEWDLCYEDYIAADGELPKAFMGKNLTNPYVLRYEALQRLLSKEELVRVVLHIAKHRGYGNKNAKITKSEESKREQGKILSALATNASVIARYRTVGEYFYKEFCEVIKNPQGLNTNENCTQPKVRVLKPIRNKGGEYTNCILQEDLQRELRCIFEHQKGFGFSITQEFQDKILKIAFYQRSLKDFSHLVGKCTFYPDEPRAPKFSLSAIEFITKAKAINLLASIAKESGEVWDKEQWRERLDSVFSAVCERGINTIPSSSHFLNIFDILYL

SEQ ID NO: 461 - protein, 1688 aa, Ignavibacterium album
MEFKKVLGLDIGTNSIGCALLSLPKSIQDYGKGGRLEWLTSRVIPLDADYMKAFIDGKNGLPQVITPAGKRRQKRGSRRLKHRYKLRRSRLIRVFKTLNWLPEDFPLDNPKRIKETISTEGKFSFRISDYVPISDESYREFYREFGYPENEIEQVIEEINFRRKTKGKNKNPMIKLLPEDWVVYYLRKKALIKPTTKEELIRIIYLFNQRRGFKSSRKDLTETAILDYDEFAKRLAEKEKYSAENYETKFVSITKVKEVVELKTDGRKGKKRFKVILEDSRIEPYEIERKEKPDWEGKEYTFLVTQKLEKGKFKQNKPDLPKEEDWALCTTALDNRMGSKHPGEFFFDELLKAFKEKRGYKIRQYPVNRWRYKKELEFIWTKQCQLNPELNNLNINKEILRKLATVLYPSQSKFFGPKIKEFENSDVLHIISEDIIYYQRDLKSQKSLISECRYEKRKGIDGEIYGLKCIPKSSPLYQEFRIWQDIHNIKVIRKESEVNGKKKINIDETQLYINENIKEKLFELFNSKDSLSEKDILELISLNIINSGIKISKKEEETTHRINLFANRKELKGNETKSRYRKVFKKLGFDGEYILNHPSKLNRLWHSDYSNDYADKEKTEKSILSSLGWKNRNGKWEKSKNYDVFNLPLEVAKAIANLPPLKKEYGSYSALAIRKMLVVMRDGKYWQHPDQIAKDQENTSLMLFDKNLIQLTNNQRKVLNKYLLTLAEVQKRSTLIKQKLNEIEHNPYKLELVSDQDLEKQVLKSFLEKKNESDYLKGLKTYQAGYLIYGKHSEKDVPIVNSPDELGEYIRKKLPNNSLRNPIVEQVIRETIFIVRDVWKSFGIIDEIHIELGRELKNNSEERKKTSESQEKNFQEKERARKLLKELLNSSNFEHYDENGNKIFSSFTVNPNPDSPLDIEKFRIWKNQSGLTDEELNKKLKDEKIPTEIEVKKYILWLTQKCRSPYTGKIIPLSKLFDSNVYEIEHIIPRSKMKNDSTNNLVICELGVNKAKGDRLAANFISESNGKCKFGEVEYTLLKYGDYLQYCKDTFKYQKAKYKNLLATEPPEDFIERQINDTRYIGRKLAELLTPVVKDSKNIIFTIGSITSELKITWGLNGVWKDILRPRFKRLESIINKKLIFQDEDDPNKYHFDLSINPQLDKEGLKRLDHRHHALDATIIAATTREHVRYLNSLNAADNDEEKREYFLSLCNHKIRDFKLPWENFTSEVKSKLLSCVVSYKESKPILSDPFNKYLKWEYKNGKWQKVFAIQIKNDRWKAVRRSMFKEPIGTVWIKKIKEVSLKEAIKIQAIWEEVKNDPVRKKKEKYIYDDYAQKVIAKIVQELGLSSSMRKQDDEKLNKFINEAKVSAGVNKNLNTTNKTIYNLEGRFYEKIKVAEYVLYKAKRMPLNKKEYIEKLSLQKMFNDLPNFILEKSILDNYPEILKELESDNKYIIEPHKKNNPVNRLLLEHILEYHNNPKEAFSTEGLEKLNKKAINKIGKPIKYITRLDGDINEEEIFRGAVFETDKGSNVYFVMYENNQTKDREFLKPNPSISVLKAIEHKNKIDFFAPNRLGFSRIILSPGDLVYVPTNDQYVLIKDNSSNETIINWDDNEFISNRIYQVKKFTGNSCYFLKNDIASLILSYSASNGVGEFGSQNISEYSVDDPPIRIKDVCIKIRVDRLGNVRPL

SEQ ID NO: 462 - protein, 1354 aa, Indibacter alkaliphilus
MKKILGLDLGTTSIGWAFIKEPEKDVVGSEIVDMGVRIVPLSSDEENDFAKGNTISINADRTLKRGARRNLQRFKQRRNALLETFKEKNLIPSNFQYAEDGPSSTFSTLKLRDKAAKEKIELDDFVKVLLQINKKRGYKSSRKAMSEEDEGTAIDSMGIAKELYENDLTPGQWVYEALKNGRKNVPDFYRSDLQEEFKKIVNYQSEFYPDILNTSFVEDWMGKASTPTKQYFNKRGVQLAENKGKREERRLQEYKWRAEAVNFKIDLSEIALILSQINSQISNSSGYLGAISDRSKELYFKNLTVGQYLYQQVKKNPHTRLKGQVFYRQDYLDEFEKIWSVQSSFYPQLNDELKQEVRDVTIFFQRRLKSQKHLISNCEFEEHHKVVPKSHPIFQEFRIWQNLNNLTLIKKDNLNEKCELALEDKTALANELAFKKELSVKDALKVLGLKPSDWEFNFTKIEGNRTNHAFFEAFAKIIELEDGEPIDLGNLKADDILDQFSEAFLRIGIDTELLQVNSDIEGAEYEKQSYIQFWHLLYSSEDDQKLKQNLIRKFGFKPEHAKILASISLQDDHASLSSRAIKKILPHLQSGLIYDKACTYAGYNHSSSFTKDENEKRELRAELELLKKNSLRNPVVEKILNQMINVVNAILKDPNLGRPDEIRVEMARELKANAEQRKNMTSNIASATRDHEKYREILKKEFGLKRVTKNDLLRYKLWLETDGISLYTGKPIEASKLFSKEYDIEHIIPKARLFDDSFSNKTICERQLNIDKANVTAFSFLQNKLSADEFEQYQSRVKSLYGKLSKAKIQKLLMANDKIPEDFIARQLQETRYISKKAKEILFEITMRVSVTTGTITDKLREDWGLVEIMKELNWEKYDKLGLTYTIEGKHGERLNKIKDWNKRNDHRHHAMDALTVALTKPAYIQYLNNLNAKAIGNKKGTEIFAIEQKYLKRENGKLCFIPPIENIRAEAKKHLSKILVSYKAKNKVVTINKNKTKKKAGFNEQTALTPRGQLHKETVYGKSFHYSTKFEKIGASFDAQKINTVAKKEEREALLKRLAENGNDPKKAFTGKNSLNKMPIYLDLGKNIKLSEKVKTVVLEQNYTIRKNIDPDLKVDKVIDVGIKRILESRLEEFGGNAKLAFSNLEENPIWLNKEKGIPIKRVKISGVSNVESLHVKKDHFGEKILDEEGNEIPVDFVSTGNNHHVAIYEDEDGNLQDEVVNFYEAVIRRNQGESIIKYRHEEGWNFLYSIKQNEFFVFPSQDFNPNDFDLLDPKNYDLISPNLYRAQKFSKVMYGNSAVRDYVFRHHLETVLNDVKELKDVAYKQLKSLQYLNGIKKVRLNHLGQIIQVGEY

SEQ ID NO: 463 - protein, 1397 aa, Joostella marina
MKKVLGLDLGTNSIGWALVNEATKEEKKEGKSSEIIKLGVRVNPLTVDEKTNFEKGRPLSTNADRTLKRSARRNLQRYKLRRRNLIEILIKNGFITKDTPLTETGKDTTHQTLKLRAKSAKEKVDLKDFAKILLTINKKRGYKSSRKVNSDEDGLAIDGMAVAKHLYEQNLTPGQYVLNLLQKNKKYVPDFYRSDLQEEFKNIWNNQKTYYFDILTDTLFEELKDKNKSQTWAICKKPFDIAGIKQIGKASDKRLERYKWRTEGLTQKLNLEYLAIALQEINNDINKSSGYLGAISDRSKELFFNKETVGENLYRQLVKTPHTSLRNQVFYRQDYLDEFETIWETQAKFYPQLTHTLKEEIRDVIIFYQRKLKSQKSLISFCQFESWEQTYIEKETGKSKTRTVGRKVIPKSSPLFQEFKIWQNLNSLEFRNSDEGEIIEFIKLDEDIRQTVFEELNLRGNLKPNDVLKILGNYISLGKVSQWKCNFEEIEGNRTNAALYNVYQIIAENEGYGFDWAKKTASEINKELKNIFPQLGIDASILDFDFTQANFDKQTSYQLWHLLYSAEEDFKISEEDKVLYGNSSVSLKKKLHQKYGFKPEYTKLLTNISLQPDYGNLSAKAICNILPYLKENNVYSEACDLTGYNHSNFLTAEEQAKRPLKPILELLKKNSLRNPVVEKILNQMVNVVNQVIETYGKPDEIRIELTRELKKSAKERANMTKSIADATRRNDDYRKTIIKEFGIPNPTKSDVVRYRLWQELASRGYKDIFTDTEIKPQELFSNKIDIEHIIPKALLFDDSFSNKTLAFKKDNLKKANRTAYDFIANDYAPNLENYIERVESLHKDRKITRAKRNKLLMLQSKLPDGFIERDLRNSQYITKEAKKMLYEVCRTVVSTSGSITDKLREDWDLINVMKELNFPKYKALGLTEKIERYDIGAEKMKEVEIIEDWNKRNDHRHHAIDALTVAFSTHSHIQYLNHLNARRDEGHKKHAAIIAIESTITEKEGNKKRRFIAPLPNFRLQAKEHIESILVSFKNKNKVVTNNINKTKRIKKDKFNTKVQLTPRGQLHKETIYGKIKQPLEKHIKLNKSFTLEQAKLIIDKRQREKVLNHLEKYAHNSDIAFNSKTLKKNPLLISDEPLKEVLCFEEVFTIRKDISYDNFKNEKQLDKVIDEKVKQALKERINQYNGDFREAFSDIERNPIWLNKAKGICVKRATIKGVSNAEPLHTAKNHLGEEVLTENKEQIPVDYVSTGNNHHVAIYEDEDGNLQEKVVSFYEAVIRVNEGLPIIDKEYNKSLGWTFKFTMKQNEMFVFPSEDFNPTEIDLLDQKNASLISPNLFRVQKFTIKDYFFRHHLETTVENNNTLKNTTWRREGLSGIYGIIKIRLNHLGEIVQVGEY

SEQ ID NO: 464 - protein, 1060 aa, Kingella kingae
MAAKSLNYILGLDLGIASCGWAVVEMDEQENPLRLIDVGVRTFEEAENPKDGSSLAETRRLARAQRRLISRRANRMNKLCRLLKQENVLQANDYDEKGLIIGLPNQAWELRAQGLDRKLEPKEWAAVLIHLVKHRGYLSQRKNESQTADKELGALLSGMNHNHQLLQSQSNQYRTPAELAIKQFATQDGHIRNQRGAYTHTFNRLDLQNELNQLFDAQTRLGNPHVSGSLKTAINDLLMNQKAALSGDAILEMLGRCTFEPSEYKAAKNTYSAERFVWLGKLTNLRIQDNGLESALSREQRELLLNEPYNKTKLTYQQVRKLLRLPETAFFKGLRYGKDNAESATFMEMKSYHAIRKSLENKSLKSEWEKLKTQPKLLDLIGTAFSIYKTDDEIAGCLKNQLPENVIIALQGQLNFSNFMELSLKALEKLLPLMEQGLRYDEACTQIYGNRHEKIADKTEKFLPNIPADKLRNPVVLRTLTQARKVINAIIRRYGSPARVHIETGREVGKSFSDRDKLKKQQEENQEQRRRAIDEWKQFFPNAAHEPKAVDILKLRLYQLQQGKCLYSGLPIDVRRLPEKGYVEIDHALPFSRTWDDSFNNKILVLASENQNKGNQTPYEYLRGADNSESWRLFVENVQNCQFSPNKKQKIMAKQLDEKGFLERNLNDTRYVSRFLCQFISEHLHLTGKGKKRVFASNGQITALLRGRWGLSKNREENDRHHAVDAVVVACSTVAMQQKITQFVRYQKGNVFTGERIDKETGEVISIHFPTPWEHFREEVMIRVFDDNPLRTLPEKLPNRPEALHEYVMPLFVSRMPTRKMTGQGHKETIKSAKRLDEKISVLRVPLTQLKLNDLENMVNREREPALYEALKARLEQFKNDPAKAFAEPFFKQGGQQVKAVRVEIVQKSGMLLRKINGVADNGSMVRVDVFEKSGKFYLVPIYAWQVAEGILPNYAVVAHKDESDWILMDESYHFKFALYKNDLLEVQTKKGGIMGYFASLDRATGAITIREHDRDKKKCKDGEHRSIGVKMASSFKKLQVDELGKNIHETRSRKRPNIG

SEQ ID NO: 465 - protein, 1314 aa, Lactobacillus animalis
MLKKDYSIGLDIGTNSVGHAVVTDDYKVPTKKMKVFGDTSKKTIKKNMLGVLLFNEGQTAADTRLKRGTRRRYTRRKNRLRYLQEIFAPELAKVDPNFLYRLEESSLVAEDKKYDVYPIFGKREEELLYHDTYKTIYHLRSALANNDQPADLRLVYLALAHIIKYRGNFLLEGEIDLRTTDINKVFAEFSETLNENSDENLGKLDVADIFKNNTFSKTKKSEELLKLSGAKKNQLAHQLFKMMVGNMGSFKKVLGTDEEHKLSFGKDTYEDDLNDLLAEAGDQYLDIFVAAKKVYDAAILASILDVKDTQTKTVFSQAMIERYEEHQKDLIELKRVFKKYLPEKCHDFFSEPKISGYAGYIDGKVSEEDFYKYTKKTLKGIPETEEILQKIDANNYLRKQRTFDNGAIPHQVHLKELVAIVENQGKYYPFLRENKDKFEKILNFRIPYYVGPLARGNSKFAWLTRAGEGKITPYNFDEMIDKETSAEDFIKHMTINDLYLPTEPVLPKHSLLYERYTIFNELAGVRYVTENGEAKYFDAQTKRSIFELFKLDRKVSEKMVIKHLKVVMPAIRIQALKGLDNGKFNASYGTYKDLVDMGVAPELLNDEVNSEKWEDIIKTLTIFEGRKLIKRRLENYRDFLGEDILRKLSRKKYTGWGRLSAKLLDGIYDKKTHKTILDCLMTEDYSQNFMQLINDDNYSFKETIKNAQVIEKEETLAKTVQELPGSPAIKKGILQSLEIVDEIIKVMGYKPKSIVVEMARETQKTHGTRKREDRVQQIVENLKDANELPEKLPSNAELSDERKYLYCLQNGRDMYTGAPLDYDHLQFYDVDHIIPQSFLKDDSIENKVLTIKKENVRKTNGLPSEAVIQKMGSFWKKLLDAGAMTNKKYDNLRRNLHGGLNEKLKERFIERQLVETRQITKYVAQLLDQRLNYDGNGVELDEKIAIVTLKAQLASQFRSEFKLRKVRALNNLHHAHDAYLNAIVANLIMAKYPELEPEFVYGKYRKAKFKGLGKATAKNTLYANVLYFLKENEVYPFWDKARDLPTIKRYLYRAQVNKVRKAERQIGGFSDEMLVPKSDSGKLLPRKEGLDPVKYGGYAKAVESYAVLITADEVKKGKTKKVKTLVNIPIIDSKKYEADPTAYLASRGYTNVTNSFILPKYSLLEDPEGRRRYLASFKEFQKANELILPQHLVELLYWVNAKDGEQKLEDHKAEFKELFDKIMEFADKYVVAPKNSEKIRRLYEENQDATPMELGKNFVELLRYTADGAASDFKFFGENIPRKRYNSAGSLLNGTLIYQSKTGLYETRIDLGKL

SEQ ID NO: 466 - protein, 1371 aa, Lactobacillus buchneri
MKVNNYHIGLDIGTSSIGWVAIGKDGKPLRVKGKTAIGARLFQEGNPAADRRMFRTTRRRLSRRKWRLKLLEEIFDPYITPVDSTFFARLKQSNLSPKDSRKEFKGSMLFPDLTDMQYHKNYPTIYHLRHALMTQDKKFDIRMVYLAIHHIVKYRGNFLNSTPVDSFKASKVDFVDQFKKLNELYAAINPEESFKINLANSEDIGHQFLDPSIRKFDKKKQIPKIVPVMMNDKVTDRLNGKIASEIIHAILGYKAKLDVVLQCTPVDSKPWALKFDDEDIDAKLEKILPEMDENQQSIVAILQNLYSQVTLNQIVPNGMSLSESMIEKYNDHHDHLKLYKKLIDQLADPKKKAVLKKAYSQYVGDDGKVIEQAEFWSSVKKNLDDSELSKQIMDLIDAEKFMPKQRTSQNGVIPHQLHQRELDEIIEHQSKYYPWLVEINPNKHDLHLAKYKIEQLVAFRVPYYVGPMITPKDQAESAETVFSWMERKGTETGQITPWNFDEKVDRKASANRFIKRMTTKDTYLIGEDVLPDESLLYEKFKVLNELNMVRVNGKLLKVADKQAIFQDLFENYKHVSVKKLQNYIKAKTGLPSDPEISGLSDPEHFNNSLGTYNDFKKLFGSKVDEPDLQDDFEKIVEWSTVFEDKKILREKLNEITWLSDQQKDVLESSRYQGWGRLSKKLLTGIVNDQGERIIDKLWNTNKNFMQIQSDDDFAKRIHEANADQMQAVDVEDVLADAYTSPQNKKAIRQVVKVVDDIQKAMGGVAPKYISIEFTRSEDRNPRRTISRQRQLENTLKDTAKSLAKSINPELLSELDNAAKSKKGLTDRLYLYFTQLGKDIYTGEPINIDELNKYDIDHILPQAFIKDNSLDNRVLVLTAVNNGKSDNVPLRMFGAKMGHFWKQLAEAGLISKRKLKNLQTDPDTISKYAMHGFIRRQLVETSQVIKLVANILGDKYRNDDTKIIEITARMNHQMRDEFGFIKNREINDYHHAFDAYLTAFLGRYLYHRYIKLRPYFVYGDFKKFREDKVTMRNFNFLHDLTDDTQEKIADAETGEVIWDRENSIQQLKDVYHYKFMLISHEVYTLRGAMFNQTVYPASDAGKRKLIPVKADRPVNVYGGYSGSADAYMAIVRIHNKKGDKYRVVGVPMRALDRLDAAKNVSDADFDRALKDVLAPQLTKTKKSRKTGEITQVIEDFEIVLGKVMYRQLMIDGDKKFMLGSSTYQYNAKQLVLSDQSVKTLASKGRLDPLQESMDYNNVYTEILDKVNQYFSLYDMNKFRHKLNLGFSKFISFPNHNVLDGNTKVSSGKREILQEILNGLHANPTFGNLKDVGITTPFGQLQQPNGILLSDETKIRYQSPTGLFERTVSLKDL

SEQ ID NO: 467 - protein, 315 aa, Lactobacillus casei
MFKDYLKQLEDDGTAKAIRQLYDRYIDGDDAKPFVREDFVKALTKEVTAHPNAKSPELLERLAQPDFMLKQRNKANGAIPVQMQQRELDQIIKNQSVYYDWLAAPNPVEKHRKSMPYQLDELLNFRIPYYVGPLVTAKEQKAARGGVFAWMVRKDPDGNITPYNFDEKVDREASANTFIQRMKTTDTYLIGEDVLPKQSLLYQSYEVLNELNNVRVNDNKLSFDQKQQVLGELFERHNTVTIKQFVDNLLAHGDYDRIPEVRGLADEKRFLSSLSTYNQLKGILHEAIDDSDKQTDMVDCKINPNAVRTKKISFL

SEQ ID NO: 468 - protein, 236 aa, Lactobacillus casei
MFKDYLKQLEDDGTAKAIRQLYDRYIDGDDAKPFVREDFVKALTKEVTAHPNAKSPELLERLAQPDFMLKQRNKANGAIPVQMQQRELDQIIKNQSVYYDWLAAPNPVEKHRKSMPYQLDELLNFRIPYYVGPLVTAKEQKAARGGVFAWMVRKDPDGNITPYNFDEKVDREASANTFIQRMKTTDTYLIGEDVLPKQSLLYQSYEVLNELNNVRVNDNKLSSSIFKSSATMITNS

SEQ ID NO: 469 - protein, 1389 aa, Lactobacillus casei
MIIRTYELKTITTIAILKMFQLLTGGLSMTKLGKPYGIGVDIGSNSIGFAAVDENSHLIRLKGKTVIGARLFEEGKAAADRRASRTTRRRLSRNRWRLSFLRDFFESHITPTGPNFFMRQKYSEISPKDKARYKYEKRLFNDRTDAEFYQQYPTMYHLRNRLLTDPSKADVREIYFAIHHILKSRGHFLTSGYAKDFNTNKVALNEIFPALQDAYAQVYPDLDITFDENKVNEFKTVLLNEKATPSDTQRALVNLLLAEDGDKDILKQQKQVLTEFAKAVVGLKTKLNVALGTEVDSSEATVWNFSLGQLDDKWAGIESAMTDEGTEILDQIRDLYRARLLNGIVPAGKTLSQAKVDDYAQHHEDLELFKDYLKQLEDDGTAKAIRQLYDRYIDGDDAKPFVREDFVKALTKEVTAHPNAKSPELLERLAQPDFMLKQRNKANGAIPVQMQQRELDQIIKNQSVYYDWLAAPNPVEKHRKSMPYQLDELLNFRIPYYVGPLVTAKEQKAAQGGVFAWMVRKDPDGNITPYNFDEKVDREASANTFIQRMKTTDTYLIGEDVLPKQSLLYQRYEVLNELNNVRVNNEKLSIEQKQQVIRELFERHNSVTIKQFAENLRAHGDYAHIPEIRGLADEKRFLSSLSTYRQLKSLLPDAIDDPAKQADIENIIAWSTVFEDAAIFKTKLKEINWLDSQTITKLSNIRYRGWGQFSHKFLNGLTLGNGHTIIQELFLSNNNLMQILTDETLQKKMTELNADKLKAANINDAIDDAYTSPSNKKALRQVLRVIEDIKRAADGQDPSWLYVETADGGGTPGKRTRARQHQLQEIYANAAHELIDSAVRGELEDKIADKADFNDRLVLYFMQGGRDIYTGTPLNIDQLSSYDIDHILPQSLIKDNSLDNRVLVHAIINREKNATFASTIYAQKMNATWRQWHEAGLISGRKLRNLQMRPDQIDKYASGFVARQLVETRQIIKLTEQIVAAQYPETKIIAVKAGLSHQLREELEFPKNRDVNHYHHAFDAFLAARIGTYLLKRFPNLQAFFTYGKFKKADVKKLRGFNFIRDITHAEDKIVVKDTGEVIWDKKRDVDELDRIYNFKRMLITHEVHFEKADLFKQTVYGAKDSKEAGGKKQLISKKKGYPVDIYGGYTQETGSYLSVVRLTKKAMYAVVKVSTRDAAKLAVAKSISEQKENETLNDIIDEKLSKISKNGKITHELFEVVLPRVGQKTLFKNSKYNLFLVNSDTYMHNYQELWMPREYQKMWKDISLSKYGDAQTEDQLDQIFGFIVSQVNSYFNLYDINQFRKKLNDAADKFATLPMRDTDDMQGKIATIGQLLIGLQANAARSDLRNLDIKTPLGLLQIPNGISLDSDTSVVYQSPTGLLEREVHLSDL

SEQ ID NO: 470 - protein, 412 aa, Lactobacillus casei
MIKDNSLDNRVLVHPLVNREKDTIFASTRFAKQTNGMWRQWHAAGLISSRKLRNLQMRPDEIDKYASGFVARQLVETRQIIKLTEQIVADQYPDTKIIAVKAGLSSQLRKELDFPKNREVNHYHHAFDAFLAARIGTYLLKRYPNLEPFFTYGKFKKTEVKKLKSFNFIRDMTHAKDKIVAKETGEIVWDNASDINELDRIYNFKRMLITHEVRFETASLFKQTLYAAKNPKNRGGSRQLIPKKKGYLVDIYGGYTQETGSYLSVVRLTKKAMYAVVKVSTRDAAKLAVAKSISEQKENETLKKIIDGKLSKTSKKGKTTHQLFEIVLPRVGQKTLFKNSKYNQFLVNSDTYMHNYQELWMPREYQRMWKDILLSNHGDAQIEGQLDQIFKFIVSQVNSYFNLYDINQFRKK

SEQ ID NO: 471 - protein, 234 aa, Lactobacillus casei
MKVTKKTETIFKVVKIATSQVAALNKARSRSTAEELSVLTELLKPKFSKVGKNGKITDTPFEVVLPRVPREQLFYNAKYGFFMVNSDTMFHNFQEIWVSRSDQKILQQIRKAKIDYPNVDQDLDNLFHNLADQIVKYFDLYSIAGFKEKISQSQNTFNDLAVDDTDQSVGKITVINELLKGAQANGMTGSLKVLKISTPFGFTQDKSGVLTKDSSIIYQSPTGLFERSVRLTDL

SEQ ID NO: 472 - protein, 566 aa, Lactobacillus casei
MQILTDEVLKQKIAELNAHELKASGIYAAIDDAYTSPSNKKALRQVLSVIDDITNAAGQAPNWLYIETADGDGVPGKRTNSRQRKIQEIYVNAAQELITSSVRGELEDKIASRADFTDRLVLYFMQGGRDIYTGEPLNIDNLSSYDIDHILPQSLIKDNSLDNRVLVHPLVNREKDTIFASTRFAKQMNGMWRQWHAAGLISSRKLRNLQMRPDEIDKYASGFVARQLVETRQIIKLTEQIVADQYPDAKIIAVKAGLSSQLRKELDFPKNREVNHYHHAFDAFLAARIGTYLLKRYPNLEPFFTYGKFKKTEVKKLKSFNFIRDMTHAKDKIVAKETGEIVWDNASDINELDRIYNFKRMLITHEVRFETASLFKQTLYAAKNSKNRGGSRQLIPKKKGYLVDIYGGYTQETGSYLSVVRLTKKAMYAVVKVSTRDAAKLAVAKSISEQKENETLKKIIDGKLSKTSKKGKTTHQLFEIVLPRVGQKTLFKNSKYNQFLVNSDTYMHNYQELWMPREYQRMWKDILLSNHGDAQLEGQLDQIFKFIVSQVNSYFNLYDINQFRKK

SEQ ID NO: 473 - protein, 1363 aa, Lactobacillus casei
MTKLGKPYGIGVDIGSNSIGFAAVDENSHLIRLKGKTVIGARLFEEGKAAADRRASRTTRRRLSRNRWRLSFLRDFFESHITPTDPNFFMRQKYSEISPKDKARYKYEKRLFNDRTDAEFYQQYPTMYHLRNRLLTDPSKADVREIYFAIHHILKSRGHFLTSGYAKDFNTNKVALNEIFPALQDAYAQVYPDLDITFDENKVNEFKTVLLDEKATPSDTQRALVNLLLAEDGDKDILKQQKQVLTEFAKAVVGLKMKLNVALGTEVDSSEATAWNFSLGQLDDKWAGIESAMTDEGTEILDQIRDLYRARLLNGIVPAGKTLSQAKVDDYEQHHEDLELFKDYLKQLEDDGMAKVIRQLYDRYIDGDDAKPFVREDFVKALTKEVTAHPNAKSPELLERLVQPDFMLKQRNKANGAIPVQMQQRELDQIIKNQSVYYDWLAAPNPVEKHRQSMPYQLDELLNFRIPYYVGPLVTAKEQKAAQGGVFAWMVRKDPDGNITPYNFDEKVDREASANTFIQRMKTTDTYLIGEDVLPKQSLLYQSYEVLNELNNVRVNDNKLSFDQKQQVLGELFERHNTVTIKQFVDNLLAHGDYDRIPEVRGLADEKRFLSSLSTYNQLKGILHEAIDDSDKQTDIEKIIAWSTIFEDKAIFKTKLNEISWLTAGMINSLANIRYRGWGQFSHKLLNELTLSTGRTVFEELLISSHNLMQILTDEVLKQKIAELNAHELKASGIYAAIDDAYTSPSNKKALRQVLSVIDDITNAAGQAPNWLYIETADGDGVPGKRTNSRQRKIQEIYANAAQELITGSVRGELEDKIASRADFTDRLVLYFMQGGRDIYTGEPLNIDNLSSYDIDHILPQSLIKDNSLDNRVLVHPLVNREKDTIFASTRFAKQMNGMWRQWHAAGLISSRKLRNLQMRPDEIDKYASGFVARQLVETRQIIKLTEQIVADQYPDAKIIAVKAGLSSQLRKELDFPKNREVNHYHHAFDAFLAARIGTYLLKRYPNLEPFFTYGKFKKTEVKKLKSLKSFNFIRDMTHAKDKIVAKETGEIVWDNASDINELDRIYNFKRMLITHEVRFETASLFKQTLYAAKNSKNRGGSRQLIPKKKGYLVDIYGGYTQETGSYLSVVRLTKKAMYAVVKVSTRDAAKLAVAKSISEQKENETLKKIIDGKLSKTSKKGKTTHQLFEIVLPRVGQKTLFKNSKYNQFLVNSDTYMHNYQELWMPREYQRMWKDILLSNHGDAQLEGQLDQIFKFIVSQVNSYFNLYDINQFRKKIADATDKFAKLPTHDTDNARGKIATIGQLLIGLQANAMRSDLRNLDIKTPFGLLQIGTGITLDLDTSIIYQSPTGLFEREVPLTDL

SEQ ID NO: 474 - protein, 1360 aa, Lactobacillus casei
MTKLGKPYGIGVDIGSNSIGFAAVDENSHLIRLKGKTVIGARLFEEGKAAADRRASRTTRRRLSRNRWRLSFLRDFFESHITPTDPNFFMRQKYSEISPKDKARYKYEKRLFNDRTDAEFYQQYPTMYHLRTRLLTDPSKADVREIYFAIHHILKSRGHFLTPGYAKDFNTNKVALNEIFPALQDAYAQVYPDLDITFDENKVNEFKTVLLNEKATPSDTQRALVNLLLAEDGDKDILKQQKQVLTEFAKAVVGLKTKLNVALGTEVDSSEATVWNFSLGQLDDKWAGIESAMTDEGTEILDQIRDLYRARLLNGIVPAGKTLSQAKVDDYAQHHEDLELFKDYLKQLEDDGTAKAIRQLYDRYIDGDDAKPFVREDFVKALTKEVTAHPNAKSPELLERLAQPDFMLKQRNKANGAIPVQMQQRELDQIIKNQSVYYDWLAAPNPVEKHRKSMPYQLDELLNFRIPYYVGPLVTAKEQKAAQGGVFAWMVRKDPDGNITPYNFDEKVDREASANTFIQRMKTTDTYLIGEDVLPKQSLLYQSYEVLNELNNVRVNDNKLSFDQKQQVLGELFERHNTVTIKQFVDNLLAHGDYDRIPEVRGLADEKRFLSSLSTYNQLKGILHEAIDDADKQTDIENIIAWSTIFEDKAIFKTKLNEISWLNAGMINSLANIRYRGWGQFSHKLLNELTLSTGRTVFEELLISSRNLMQILTDEVLKQKIAELNAHELKASGIYAAIDDAYTSPSNKKALRQVLSVIDDITNAAGQAPNWLYIETADGDGVPGKRTNSRQRKIQEIYANAAQELITGSVRGELEDKIASRADFTDRLVLYFMQGGRDIYTGEPLNIDNLSSYDIDHILPQSLIKDNSLDNRVLVHPLVNREKDTIFASTRFAKQMNGMWRQWHAAGLISSRKLRNLQMRPDEIDKYASGFVARQLVETRQIIKLTEQIVADQYPDTKIIAVKAGLSSQLRKELDFPKNREVNHYHHAFDAFLAARIGTYLLKRYPNLEPFFTYGKFKKTEVKKLKSFNFIRDMTHAKDKIVAKETGEIVWDNASDINELDRIYNFKRMLITHEVRFETASLFKQTLYAAKNSKNRGGSRQLIPKKKGYLVDIYGGYTQETGSYLSVVRLTKKAMYAVVKVSTRDAAKLAVAKSISEQKENETLKKIIDGKLSKTSKKGKTTHQLFEIVLPRVGQKTLFKNSKYNQFLVNSDTYMHNYQELWMPREYQRMWKDILLSNHGDAQLEGQLDQIFKFIVSQVNSYFNLYDINQFRKKIADATDKFAKLPTHDTDNARGKIATIGQLLIGLQANAMRSDLRNLDIKTPFGLLQIGTGITLDLDTSIIYQSPTGLFEREVPLTDL

SEQ ID NO: 475 - protein, 700 aa, Lactobacillus casei
MTKLGKPYGIGVDIGSNSIGFAAVDENSHLIRLKGKTVIGARLFEEGKAAADRRASRTTRRRLSRNRWRLSFLRDFFESHITPTDPNFFMRQKYSEISPKDKARYKYEKRLFNDRTDAEFYQQYPTMYHLRTRLLTDPSKADVREIYFAIHHILKSRGHFLTSGYAKDFNTNKVALNEIFPALQDAYAQVYPDLDITFDENKVNEFKTVLLDEKATPSDTQRALVNLLLAEDGDKDILKQQKQVLTEFAKAVVGLKTKLNVALGTEVDSSEATAWNFSLGQLDDKWAGIESAMTDEGTEILDQIRDLYRARLLNGIVPAGKTLSQAKVDDYEQHHEDLELFKDYLKQLEDDGMAKAIRQLYDRYIDGDDAKPFVREDFVKALTKEVTAHPNAKSPELLERLVQPDFMLKQRNKANGAIPVQMQQRELDQIIKNQSVYYDWLAAPNPVEKHRQSMPYQLDELLNFRIPYYVGPLVTAKEQKAAQGGVFAWMVRKDPDGNITPYNFDEKVDREASANTFIQRMKTTDTYLIGEDVLPKQSLLYQSYEVLNELNNVRVNDNKLSFDQKQQVLGELFERHNTVTIKQFVDNLLAHGDYDRIPEVRGLADEKRFLSSLSTYNQLKGILHEAIDDSDKQTDIEKIIAWSTIFEDKAIFKTKLNEISWLNAGMINSLANIRYRGWGQFSHKLLNELTLSTGRTVFEA

SEQ ID NO: 476 - protein, 330 aa, Lactobacillus casei
MTKLGKPYGIGVDIGSNSIGFAAVDENSHLIRLKGKTVIGARLFEEGKAAADRRASRTTRRRLSRNRWRLSFLRDFFESHITPTDPNFFMRQKYSEISPKDKNRYKYEKRLFNDRTDAEFYQQYPTMYHLRNRLLTDPSKADVREIYFAIHHILKSRGHFLTPGDAKDFNTNKVALNEIFPALQDAYAQVYPDLDITFDENKMNEFKTVLLNEKATPSDTQRALVNLLLAEDGDKDILKQQKQVLTEFAKAVVGLKTKLNVALGTEVDSSEATAWNFSLGQLDDKWAGIESAMTDEGTEILDQIRDLYRARLLNGIVPAGKTLSQAKVDD

SEQ ID NO: 477 - protein, 330 aa, Lactobacillus casei
MTKLGKPYGIGVDIGSNSIGFAAVDENSHLIRLKGKTVIGARLFEEGKAAADRRASRTTRRRLSRNRWRLSFLRDFFESHITPTDPNFFMRQKYSEISPKDKNRYKYEKRLFNDRTDAEFYQQYPTMYHLRNRLLTDPSKADVREIYFAIHHILKSRGHFLTPGDAKDFNTNKVALNEIFPALQDAYAQVYPDLDITFDENKMNEFKTVLLNEKATPSDTQRALVNLLLAEDGDKDILKQQKQVLTEFAKAVVGLKTKLNVALGTEVDSSEATAWNFSLGQLDDKWAGIESAMTDEGTEILDQIRDLYRARLLNGIVPAGKTLSHAKVDD

SEQ ID NO: 478 - protein, 1361 aa, Lactobacillus casei
MTKLGKPYGIGVDIGSNSIGFAAVDENSHLIRLKGKTVIGARLFEEGKAAADRRASRTTRRRLSRNRWRLSFLRDFFESHITPTGPNFFMRQKYSEISPKDKARYKYEKRLFNDRTDAEFYQQYPTMYHLRNRLLTDPSKADVREIYFAIHHILKSRGHFLTSGYAKDFNTNKVALNEIFPALQDAYAQVYPDLDITFDENKVNEFKTVLLNEKATPSDTQRALVNLLLAEDGDKDILKQQKQVLTEFAKAVVGLKTKLNVALGTEVDSSEATVWNFSLGQLDDKWAGIESAMTDEGTEILDQIRDLYRARLLNGIVPAGNTLSQAKVDDYAQHHEDLELFKDYLKQLEDDGTAKAIRQLYDRYIDGDDAKPFVREDFVKALTKEVTAHPNAKSPELLERLAQPDFMLKQRNKANGAIPVQMQQRELDQIIKNQSVYYDWLAAPNPVEKHRKSMPYQLDELLNFRIPYYVGPLVTAKEQKAAQGGVFAWMVRKDPDGNITPYNFDEKVDREASANTFIQRMKTTDTYLIGEDVLPKQSLLYQRYEVLNELNNVRVNNEKLSIEQKQQVIRELFERHNSVTIKQFAENLRAHGDYAHIPEIRGLADEKRFLSSLSTYRQLKSLLPDAIDDPAKQADIENIIAWSTVFEDAAIFKTKLKEINWLDSQTITKLSNIRYRGWGQFSHKFLNGLTLGNGHTIIQELFLSNNNLMQILTDETLQKKMTELNADKLKAANINDAIDDAYTSPSNKKALRQVLRVIEDIKRAADGQDPSWLYVETADGGGTPGKRTRARQHQLQEIYANAAHELIDSAVRGELEDKIADKADFNDRLVLYFMQGGRDIYTGTPLNIDQLSSYDIDHILPQSLIKDNSLDNRVLVHAIINREKNATFASTIYAQKMNATWRQWHEAGLISGRKLRNLQMRPDQIDKYASGFVARQLVETRQIIKLTEQIVAAQYPETKIIAVKAGLSHQLREELEFPKNRDVNHYHHAFDAFLAARIGTYLLKRFPNLQAFFTYGKFKKADVKKLRGFNFIRDITHAEDKIVVKDTGEVIWDKKRDVDELDRIYNFKRMLITHEVHFEKADLFKQTVYGAKDSKEAGGKKQLISKKKGYPVDIYGGYTQETGSYLSVVRLTKKAMYAVVKVSTRDAAKLAVAKSISEQKENETLNDIIDEKLSKISKNGKITHELFEVVLPRVGQKTLFKNSKYNLFLVNSDTYMHNYQELWMPREYQKMWKDISLSKYGDAQTEDQLDQIFGFIVSQVNSYFNLYDINQFRKKLNDAADKFATLPMRDTDDMQGKIATIGQLLIGLQANAARSDLRNLDIKTPLGLLQIPNGISLDSDTSVVYQSPTGLLEREVHLSDL

SEQ ID NO: 479 - protein, 1128 aa, Lactobacillus casei
MTKLGKPYGIGVDIGSNSIGFAAVDENSHLIRLKGKTVIGARLFEEGKAAAKRRAGRTTRRRLSRNRWRLSFLRDFFESHITPTDPNFFMRQKYSEISPKDKARYKYEKRLFNDRTDAEFYQQYSTMYHLRNRLMTDPSRADVREIYFAIHHILKSRGHFLTPGDAKDFNTNDVALDEIFPALQDAYAQVYPDLGITFDEDKANEFKTILLNEIATSIDTQRALVKLLLAEEDDKDILKQQKQVLTEFAKAVVGLKTKLNLALGTEVDSSEATAWNFSLGQLDDKWAGIESAMTDEGTEILDQIRDLYRARLLNGIVPTGKTLSQAKVDDYTQHHEDLQLFKAYLKQLEDDGTAKAIRQLYDRYIDGDDAAPFLRENFVKALTKDVTAHPNTKSPELLERLAQPDFMLKQRNKANGAIPVQMQQRELDQIIKNQAVYYDWLAAPNPVEKHRKSMPYQLDELLNFRIPYYVGPLVTAKEQKAAQGGVFAWMVRKDPEGNITPYNFDEKVDREASANTFIQRMKTTDTYLIGEDVLPKQSLLYQRYEVLNELNNVRVNNEKLSIEQKQQVIRELFERHNSVTIKQFAENLRAHGDYAHIPEIRGLADEKRFLSSLSTYRQLKSLLPEAIDDPAKQADIENIIAWSTVFEDAAIFKTKLKEISWLGSEAITKLSNIRYRGWGQFSRKFLNGLTLGNGHTIIQELLLSTNNLMQILTDETLQKKMTELNADKLKTANINDAIDNAYTSPSNKKALRQVLRVVDDIKRAADGQDPSWLYVETADGGGTPGKRTRARQHQLQEIYANAAHELIDTAVRGELEDKISDKADFNDRLVLYFMQGGRDIYTGAPLNIDQLSSYDIDHILPQSLIKDNSLDNRVLVHAIINREKNATFASTIYAQKMNATWRQWHEAGLISGRKLRNLQMRPDQIDKYASGFVARQLVETRQIIKLTEQIVAAQYPDTKIIAVKAGLSHQLREELEFPKNRDVNHYHHAFDAFLAARIGTYLLKRFPNLQAFFTYGKFTKADVKKLRGFNFIRDITHAEDKIVAKDTGEVVWDKQRDVDELDRIYNFKRMLITHEVRFETADLFKQTVYGARDSKEAGGSKQLIPKKKDIQLIFMGAISERTRPILPL

SEQ ID NO: 480 - protein, 1366 aa, Lactobacillus casei
MTKLGKPYGIGVDIGSNSIGFAAVDENSHLIRLKGKTVIGARLFEEGKAAAYRRASRTTRRRLSRNRWRLSFLRDFFESHITPTDPNFFMRQKYSEISPKDKARYKYEKRLFNDRTDAEFYQQYPTMYHLRTRLLTDPSKADVREIYFAIHHILKSRGHFLTPGYAKDFNTNKVALNEIFPALQDAYAQVYPDLDITFDENKVNEFKTVLLNEKATPSDTQRALVNLLLAKEGDRDILKQQKQVLTEFAKAVVGLKTKLNVALGTEVDSSEATAWNFSLGQLDDKWAGIESAMTDEGTEILDQIRDLYRARLLNGIVPAGKTLSQAKVDDYAQHHEDLELFKDYLKQLEDDGTAKAIRQLYDRYIDGDDAKPFVREDFVKALTKEVTAHPNAKSPELLERLAQPDFMLKQRNKANGAIPVQMQQRELDQIIKNQAVYYDWLAAPNPVEKHRQSMTYQLDELLNFRIPYYVGPLVTAKEQKAAQGGVFAWMVRKDPDGNITPYNFDEKVDREASANTFIQRMKTTDTYLIGEDVLPKQSLLYQSYEVLNELNNVRVNDNKLSFDQKQQVLGELFERHNTVTIKQFVDNLLAHGDYDRIPEVRGLADEKRFLSSLSTYNQLKGILHEAIDDADKQTDIENIIAWSTIFEDKAIFKTKLNEISWLNAGMINSLANIRYRGWGQFSHKLLNELTLSTGRTVFEELLISSRNLMQILTDEVLKQKIAELNAHELKASGIYAAIDDAYTSPSNKKALRQVLSVIDDITNAAGQAPNWLYIETADGDGVPGKRTNSRQRKIQEIYANAAQELITGSVRGEFEDKIASRADFTDRLVLYFMQGGRDIYTGEPLNIDNLSSYDIDHILPQSLIKDNSLDNRVLVHPLVNREKDTIFASTRFAKQMNGMWRQWHAAGLISSRKLRNLQMRPDEIDKYASGFVARQLVETRQIIKLTEQIVADQYPDTKIIAVKAGLSSQLRKELDFPKNREVNHYHHAFDAFLAARIGTYLLKRYPNLEPFFTYGKFKKTEVKKLKSLKSLKSFNFIRDMTHAKDKIVAKETGEIVWDNASDINELDRIYNFKRMLITHEVRFETASLFKQTLYAAKNSKNRGGSRQLIPKKKGYLVDIYGGYTQETGSYLSVVRLTKKAMYAVVKVSTRDAAKLAVAKSISEQKENETLKKIIDGKLSKTSKKGKTTHQLFEIVLPRVGQKTLFKNSKYNQFLVNSDTYMHNYQELWMPREYQRMWKDILLSNHGDAQIEGQLDQIFKFIVSQVNSYFNLYDINQFRKKIADATDKFAKLPTHDTDNARGKIATIGQLLIGLQANAMRSDLRNLDIKTPFGLLQIGTGITLDLDTSIIYQSPTGLFEREVPLTDL

SEQ ID NO: 481 - protein, 1354 aa, Lactobacillus coryniformis
MTLHYNVGLDIGTNSVGYTIVDDNGKILQVKGKNGYGVRVFKEGATAAERRIFRTTHRRLKRRKWRLRLLQDFFEPYILPQDDGFFIRRKESNLVLNDRDEDTASLFNDRSDRDFYQAYPTIYHLRQALMTEKRQFDVREIYLAMHHIIKYRGHFLLNGTVNNFTNNKIDLHSDFEELNALLLNVIPELKFQIDLDHSTMFQTTLLNTTISRSGRQRDLVKSFYNGSDDKQLAKQQKSVATELLKAILGLKAKFHKLFNLDLLETTEWEFSFDAEDIDDKLAKLEPLMTENQQQVMDILQRIFAAITLNGIVPEGKTLSASKVDSYQKHKQDLKLLKAIAQHSDKKTATVLQTAYNEYINGIASKPLKQEDFYKRLTNAVKKSSDPQVADMLALIDQEKFLPKQRTKENGAIPHQLHQLELERIIDNQKDYYPWLAELNPNQARQKVAKYKLSELVAFRVPYYVGPLIEPEVQQATSNAHFAWMARKEAGPITPWNFDQKVDRNVSAERFIKRMTTKDTYLLAEDVLPLHSLLYQRFIVLNELNNVRVNGQKLTKKQKQAVYQDLFKRQPHVTKKQFKSYLVQTGEFAESSKIEGLANETSFNSGLTTENELRKIFGAQLDEARYQVDFEQIIEWATLFEDAKILRTKLAEITWLTTEQIEKLAGIRYRGWGRFSRKLLAGLRDQNGQQIIDLLWDTPNNFMVIVSQAAFSEAITKENEKLIDRRGAQDVITDLYTSPQNKKALRQVLAIVADVQKAMGGVPPQRIFIEFAREDEKNPRRSVERSRQLEKLYQTISNEFLINSEVRQELKEAVDQKVNFKDRLFLYFLQGGVDLYSGKRINIDQLSHYDIDHILPQSFIKDDSLDNRVLVSQKLNRSKSDSVPLSEFANYKFGPAMQAKWLQLKEAGLLSKRKYDNLTLDPTKLSKFAPLGFVNRQLVETRQVIKLAANLLASEETKVVTIKANMTHQVRKELDFPKNRNVNNYHHAFDAYLTAFVGIFLSKRYPKLKPYFTYGDFQKGNKLPDLKNFNFLYELKNKDRSIDSNTGEIIWDKQRDLAYMNKIYNFKKVTVVHEVLTKSGALYNQTLYKASEDKASGRGTKQLIRKKDNMPTELYGGYTGSTSAFMSIVRLWKKDKPYYKVVGIPTRMAAKLANQAQLLDYLTKKFTTRKLVKKTGDYKTTVERFELVVPKVGFNQLVIDGGQPFMLGSATYQYNARELFISKEAVKALNKQLSTHVDLVQVFDEILVQVNRWFPLYDTNGFREKLSHGRDRFMKLNDSFEEKSDTQIDVLNRILIGFHANAARTNLKILGLGTDLGFMTQQAGIRLTEKAILVHQSPSGLFERKVALRDLKGLR

SEQ ID NO: 482 - protein, 544 aa, Lactobacillus crispatus
KYYLYFMQLGRDAYTGKPINIDEVSQYYDIDHILPQSFIKDDSLNNRVLVAKPINNGKSDGVPLKLFGDNLATGLGITVKQMWNNWADKGLINKAKQNNLFLDPENINKHQASGFIRKQLVETSQIIKLATTILQAEYPKTKIIVVKASSNHYLRNEFDLYKSREVNDYHHAIDAYLTTICGNLLYQAYPKLRPFFVYGQFKKFSSDPKKENEILKKTKNFDFVAKLLGSKAPNEIRSQQGKVLFEKNKIRLQLNKAYNYKYMLVSRDTTTKNQEMFGMTIYPRAERDIAKSRKLIEKRKGFSTDIYGGYTGTAAAYMAIVRINKTKSSQYKVIAVPMTKRAILNKAEKEGNYEKILKQILSPSILYNDKGKRKAGVISFDIIKGKVPYNQVVQDGNKKFLLKSAIYLCNAKQLVLSEEAMRVITGHWLDSDKQDQELLDVYDEILEKIDRYLPLFDIRDFRNKLHKGREKFLKLNAEDKFKAIIQILKGLHDNSDTGELKDIGITVPFGQLQNNSGITLSSDTILVYQSPTGLFEKRVKISSL

SEQ ID NO: 483 - protein, 298 aa, Lactobacillus crispatus
MDELNKISVNGKKLSVSVKQELYEDLFKKNNTVSAKQLKNWLIENQKLPYIKIKGLADQTKFNSSLSTYIKLKKSGLFVDKLDSNEFRDDFEKIIEWSTIFEDKQIYIQKLQTIDWLTAKQIQFLQNIRLQGWGRLSKKLLTAIVDSNGQNIIEQLWNSQQIFMSIVNKADIKGTITDANQDLMHSNSMEDILSEAYTSPANKKMIRQVVKVVHDIQKAASGQAPKQIAIEFARESRRNSKLSQTRGHKLQDIYQKISGDIVNKNLKDKLAEYIKNNQLSVWEKTSFQMNKNDQDFLF

SEQ ID NO: 484 - protein, 279 aa, Lactobacillus crispatus
MNGKKLSVSVKQELYEDLFKKNNTVSAKQLKNWLIENQKLPYIKIKGLADQTKFNSSLSTYIKLKKSGLFVDKLDSNEFRDDFEKIIEWSTIFEDKQIYIQKLQTIDWLTAKQIQFLQNIRLQGWGRLSKKLLTAIVDSNGQNIIEQLWNSQQIFMSIVNKADIKGTITDANQDLMHSNSMEDILSEAYTSPANKKMIRQVVKVVHDIQKAASGQAPKQIAIEFARESRRNSKLSQTRGHKLQDIYQKISGDIVNKNLKDKLAEYIKNNQLNKDKYYTR

SEQ ID NO: 485 - protein, 538 aa, Lactobacillus crispatus
MQLGRDAYTGKPINIDEVSQYYDIDHILPQSFIKDDSLNNRVLVAKPINNGKSDGVPLKLFGDNLATGLGITVKQMWNNWADKGLINKAKQNNLFLDPENINKHQASGFIRKQLVETSQIIKLATTILQAEYPKTKIIVVKASSNHYLRNEFDLYKSREVNDYHHAIDAYLTTICGNLLYQAYPKLRPFFVYGQFKKFSSDPKKENEILKKTKNFDFVAKLLGSKAPNEIRSQQGKVLFEKNKIRLQLNKAYNYKYMLVSRDTTTKNQEMFGMTIYPRAERDIAKSRKLIEKRKGFSTDIYGGYTGTAAAYMAIVRINKTKSSQYKVIAVPMTKRAILNKAEKEGNYEKILKQILSPSILYNDKGKRKAGVISFDIIKGKVPYNQVVQDGNKKFLLKSAIYLCNAKQLVLSEEAMRVITGHWLDSDKQDQELLDVYDEILEKIDRYLPLFDIRDFRNKLHKGREKFLKLNAEDKFKAIIQILKGLHDNSDTGELKDIGITVPFGQLQNNSGITLSSDTILVYQSPTGLFEKRVKISSL

SEQ ID NO: 486 - protein, 206 aa, Lactobacillus crispatus
MQLGRDAYTGKPINIDEVSQYYDIDHILPQSFIKDDSLNNRVLVAKPINNGKSDGVPLKLFGDNLATGLGITVKQMWNNWADKGLINKAKQNNLFLDPENINKHQASGFIRKQLVETSQIIKLATTILQAEYPKTKIIVVKASSNHYLRNEFDLYKSREVNDYHHAIDAYLTTICGNLLYQAYPKLRPFFVYGQFKKFSSDPKKRK

SEQ ID NO: 487 - protein, 857 aa, Lactobacillus crispatus
MTKLNNEYMVGLDIGTNSCGWVATDFDNNILKMHGKRALGSHLFDEGVSAADRRAFRTTRRRIKRRKWRLKLLEEIFDEEMAKVDPNFFARLKESGLSPLDTRKNVSSIVFPTKKMDKQFYKKFPTIYHLRNALMKQDKKFDLRAIYIAIHHIVKYRGNFLSNSSISNFSASKIEIDRFVNELNDLYSIFLPESGVIFDAGNASKVEDIIRNEQMFKLDKIKEIADVLPDTENKSGLKLSKKISKEISKAILGYKAKFEIILQVNVDKTDSSIWNFKLNDENADVNLSEITSDLTDTQLQILDLVRNLFSAISLLNIVDEGSTLSESMIRKYNDHAQDLKLLKTVIKNHSDRKKAHNLQLAYDKYVNNRHFVDVETKKAFPNKHLYRKSDFYEIVKKNLDASKEAVQIRKEIALDKFMPKQRSDENGVIPFQLNQIELDKIIENQGKYYPFLKEINPIKAHRMQAPYKLDELIRFRVPYYVGPMIEPTNSSYPQTRQNQSFAWMVRKAKGRITPWNFDEKVDRQKSANNFIKRLTTKDTYLFGEDVLPANSLLYQKYTVLDELNKISVNGKKLSVSVKQELYEDLFKKNNTVSAKQLKNWLIENQKLPYIKIKGLADQTKFNSSLSTYIKLKKSGLFVDKLDSNEFRDDFEKIIEWSTIFEDKQIYIQKLQTIDWLTAKQIQFLQNIRLQGWGRLSKKLLTAIVDSNGQNIIEQLWNSQQIFMSIVNKADIKGTITDANQDLMHSNSMEDILSEAYTSPANKKMIRQVVKVVHDIQKAASGQAPKQIAIEFARESRRNSKLSQTRGHKLQDIYQKISGDIVNKNLKDKLAEYIKNNQLSVWEKTSFQMNKNDQDFLF

SEQ ID NO: 488 - protein, 857 aa, Lactobacillus crispatus
MTKLNNEYMVGLDIGTNSCGWVATDFDNNILKMHGKRALGSHLFDEGVSAADRRAFRTTRRRIKRRKWRLKLLEEIFDEEMAKVDPNFFARLKESGLSPLDTRKNVSSIVFPTKKMDKQFYKKFPTIYHLRNALMKQDKKFDLRAIYIAIHHIVKYRGNFLSNSSISNFSASKIEIDRFVNELNDLYSIFLPESGVIFDAGNASKVEDIIRNEQMFKLDKIKEIADVLPDTENKSGLKLSKKISKEISKAILGYKAKFEIILQVNVDKTDSSIWNFKLNDENADVNLSEITSDLTDTQLQILDLVRNLFSAISLLNIVDEGSTLSESMIRKYNDHAQDLKLLKTVIKNHSDRKKAHNLQLAYDKYVNNRHFVDVETKKAFPNKHLYRKSDFYEIVKKNLDASKEAVQIRKEIALDKFMPKQRSDENGVIPFQLNQIELDKIIENQGKYYPFLKEINPIKAHRMQAPYKLDELIRFRVPYYVGPMIEPTNSSYPQTRQNQSFAWMVRKAKGRITPWNFDEKVDRQKSANNFIKRLTTKDTYLFGEDVLPANSLLYQKYTVLDELNKISVNGKKLSVSVKQELYEDLFKKNNTVSAKQLKNWLIENQKLPYIKIKGLADQTKFNSSLSTYIKLKKSGLFVDKLDSNEFRDDFEKIIEWSTIFEDKQIYIQKLQTIDWLTAKQIQFLQNIRLQGWGRLSKKLLTAIVDSNGQNIIEQLWNSQQIFMSIVNKADIKGTITDANQDLMHSNSMEDILSEAYTSPANKKMIRQVVKVVHDIQKAASGQAPKQIAIEFARESRRNSKLSQTRGHKLQDIYQKISGDIVNKNLKDKLAEYIKNNQLSVWEKNSFQMNKNDQDFLF

SEQ ID NO: 489 - protein, 347 aa, Lactobacillus crispatus
MVNLKSLVLILKKENEILKKTKNFDFVAKLLGSKAPNEIRSQQGKVLFEKNKIRLQLNKAYNYKYMLVSRDTTTKNQEMFGMTIYPRAERDIAKSRKLIEKRKGFSTDIYGGYTGTAAAYMAIVRINKTKSSQYKVIAVPMTKRAILNKAEKEGNYEKILKQILSPSILYNDKGKRKAGVISFDIIKGKVPYNQVVQDGNKKFLLKSAIYLCNAKQLVLSEEAMRVITGHWLDSDKQDQELLDVYDEILEKIDRYLPLFDIRDFRNKLHKGREKFLKLNAEDKFKAIIQILKGLHDNSDTGELKDIGITVPFGQLQNNSGITLSSDTILVYQSPTGLFEKRVKISSL

SEQ ID NO: 490 - protein, 534 aa, Lactobacillus crispatus
RDAYTDKPINIDEVSQYYDIDHILPQSFIKDDSLNNRVLVAKPINNGKSDGVPLKLFGDNLATGLGITVKQMWNNWADKGLINKAKQNNLFLDPENINKHQASGFIRKQLVETSQIIKLATTILQAEYPKTKIIVVKASSNHYLRNEFDLYKSREVNDYHHAIDAYLTTICGNLLYQAYPKLRPFFVYGQFKKFSSDPKKENEILKKTKNFDFVAKLLGSKAPNEIRSQQGKVLFEKNKIRLQLNKAYNYKYMLVSRDTTTKNQEMFGMTIYPRAERDIAKSRKLIEKRKGFSTDIYGGYTGTAAAYMAIVRINKTKSSQYKVIAVPMTKRAILNKAEKEGNYEKILKQILSPSILYNDKGKRKAGVISFDIIKGKVPYNQVVQDGNKKFLLKSAIYLCNAKQLVLSEEAMRVITGHWLDSDKQDQELLDVYDEILEKIDRYLPLFDIRDFRNKLHKGREKFLKLNAEDKFKAIIQILKGLHDNSDTGELKDIGITVPFGQLQNNSGITLSSDTILVYQSPTGLFEKRVKISSL

SEQ ID NO: 491 - protein, 278 aa, Lactobacillus crispatus
SVNGKKLSVSVKQELYEDLFKKNNTVSAKQLKNWLIENQKLPYIKIKGLADQTKFNSSLSTYIKLKKSGLFVDKLDSNEFRDDFEKIIEWSTIFEDKQIYIQKLQTIDWLTAKQIQFLQNIRLQGWGRLSKKLLTAIVDSNGQNIIEQLWNSQQIFMSIVNKADIKGTITDANQDLMHSNSMEDILSEAYTSPANKKMIRQVVKVVHDIQKAASGQAPKQIAIEFARESRRNSKLSQTRGHKLQDIYQKISGDIVNKNLKDKLAEYIKNNQLNKDKYY

SEQ ID NO: 492 - protein, 277 aa, Lactobacillus crispatus
SVNGKKLSVSVKQELYEDLFKKNNTVSAKQLKNWLIENQKLPYIKIKGLADQTKFNSSLSTYIKLKKSGLFVDKLDSNEFRDDFEKIIEWSTIFEDKQIYIQKLQTIDWLTAKQIQFLQNIRLQGWGRLSKKLLTAIVDSNGQNIIEQLWNSQQIFMSIVNKADIKGTITDANQDLMHSNSMEDILSEAYTSPANKKMIRQVVKVVHDIQKAASGQAPKQIAIEFARESRRNSKLSQTRGHKLQDIYQKISGDIVNKNLKDKLAEYIKNNQLNKDKY

SEQ ID NO: 493 - protein, 1368 aa, Lactobacillus curvatus
MSRPYNIGLDIGTSSIGWSVVDDQSKLVSVRGKYGYGVRLYDEGQTAAERRSFRTTRRRLKRRKWRLGLLREIFEPYITPIDDTFFLRQKQSNLSPKDQRKLYTQTSLFNDRTDRAFYDDYPTIYHLRYRLMTEKRQFDIREIYLAMHHIVKYRGHFLNEAPVSSFKSSEINLVAHFDRLNTIFADLFSESGFQLETDKLAEVKALLLDNQQSASNRQRQALSLIYTPSTNKAVEKQNKAIATELLKAILGLKAKFNVLTGIEAEDVKAWTLTFNAENFDEEMVKLESSLDDNAHQIIESLQELYSGVLLAGIVPENQSLSQAMITKYDDHQKHLKMLKAVREALAPGDRQRLKQAYDQYVDGQENTKAYSKEDFYGDITKALKNNPDHPIVSEIKKLIELDQFMPKQRTKDNGAIPHQLHQQELDRIIENQQQYYPWLAELNPNSKRQTVAKYKLDELVAFRVPYYVGPLITAEQQRQSSDAKFAWLIRKAEGRITPWNFDDKVDRQASANEFIKRMTTTDTYLLAEDVLPKQSLIYQRFEVLNELNGLKIDDQPITTELKQAIFTDLFMQKISVTVKNIQDYLVSEKRYASRPAITGLSDENKFNSRLSTYHDLKMIVGDAVDDVDKQADLEKCIEWSTIFEDGKIYSAKLNEIDWLTDQQRVQLAAKRYRGWGRLSAKLLTQIVNANGQRIMDLLWDTTDNFMRIVHSEDFDKLITEANQMMLAENDVQDVINDLYTSPQNKKALRQILLVVNDIQKAMKGQAPERILIEFAREDEVNSRLSVQRKRQVEQVYQNISNELLNNTEIRNELKDLSNSALSNTRLFLYFMQGGRDMYTGDSLNIDRLSTYDIDHILPQSFIKDNSLDNRVLVSQKMNRSKADQVPTDFTSVELGQKMQIQWEQMLRAGLITKKKYDNLTLNPDHISKYAMKGFINRQLVETRQVIKLATNLLMEQYGEDNIELITVKSGLTHQMRTEFDFPKNRNLNNHHHAFDAYLTAFVGLYLLKRYPKLKPYFVYGEYQKASQQDKWRNFNFLNGLKKDELVDENTEAVIWDKESGLAYLNKIYQFKKILVTRGVHENSGALFNQTLYAAKDDKASGQGGKQLIPAKQDRSTALYGGYSGKTVAYMCIVRIKNKKGDLYKVCGVETSWLAQLKQLTDEDSQKAFLEQKISPQFTKVKKQKGNIIEAVEEFEVIAPHILINQRFFDNGQELTLGSATYKHNEQELILDKTAVKLLNGALPLTQSEELAEQVYDEILDQVMHYFPLYDTNQFRAKLSTGKAAFMKLPWKSQWDGNKMVQVGQQVILDRILIGLHANAAMSDLKVLKMTTPFGMIQQSTGITLSADTQIIYQSPTGLFERRVALRDL

SEQ ID NO: 494 - protein, 669 aa, Lactobacillus delbrueckii
MAKPKDYTIGLDIGTNSVGWVVTDDQNNILRIKGKKAIGARLFTEGKVAAERRSFRTTRRRLSRRRWRIKMLEELFDEEIAKVDPSFFARLHESWISPKDKRKRYSAIVFPSPEEDKKFHESYPTIYHLRDKLMKDDQKHDIREIYIAVHQMIKARGNFLHDESVETYRSGMSSLGGRSERNILSVQTLEELNDLFAENEGTEEVELNVASAEQINDILTGGHLNADSQKEISNLLLPSSFPSFDDKAKEKQVKKLINNVATNISKAWLGYKADFSTILNLAKVDKDQKKIFAFALQGGDEEDKVQELESLLEQSQTDIVDRLIEIRHAIVLSEIVPVGMTLSEAMIDKYDQHKEDLITLKAVIRNTKDKKKAAKLQAIYDLYVKKRHADLAKAMKLTGIKKRSELLDPEELKKGISSLLDDSPEAVEIKQRLEEKTFLPLQRSNNNGVIPNQLHQVELDEIIKKQSKYYPFLAEKNPDESEEAQKKAPTKLDALLTFRVPYYVGPMITKEEQEAQNGHSFAWMVRRDPQDHEAITPWNFEKKVDKMASATQFIKRMTTKDTYLLGEDVLPASSLKYQLFTVLNELNNLRVNGKKLTSDEKEQVIEGLFKKQKTVKADKFVKYWQAKHIGADIKVKGLSDPSKFNSTMSTYIDFKKIFGDQLNDVNRQR

SEQ ID NO: 495 - protein, 544 aa, Lactobacillus delbrueckii
MTGCADYDVDHIMPQSFVKDDSLDNRVLVARAVNNQKSDKVPALLFGNKVVADLGITVREMWDKWQKLGMISKRKLSNLLTDPDALTEYRAQGFIRRQLVETSQVIKLTATILQSEFPDSKIIEVPAKYNSIVRKQFDLYKSREVNDFHHAIDAYLSTIVGNYLYQVYPNLRRMFVYGEFKKFSSNAEESAHDVARRVKSMNFLDDLLRGTHGDNIYCRSTGEIVFNRNDIISKLKQAYSFKQMLVTQEVFTKKSALFDQTVYPSPERDSKKRSGLIPRKKGMDTEIYGGYSGNKDAYFVLAEAVKEKGHTLQIVGVPIRALNTLKNSANYSEKLLEIIKPQVMFNKDTGKPIKGIKDVKILMDKIPCRQPVLEGESYYMLASSKYRYSLKQISLSQMSMKYILDYIDDPNFNKHEMINIDQQDEKECLLSVYDEILEKMDKYLPLFDIRSFRKKLHDGRDAFIALPVASEEKKPGEVDVIRKILKGLHANADITNLAELGFGTAALGALVSTGGIKISDDAVFIYQSPTGLFERRVKVSDLLK

SEQ ID NO: 496 - protein, 1356 aa, Lactobacillus farciminis
MTKKEQPYNIGLDIGTSSVGWAVTNDNYDLLNIKKKNLWGVRLFEEAQTAKETRLNRSTRRRYRRRKNRINWLNEIFSEELAKTDPSFLIRLQNSWVSKKDPDRKRDKYNLFIDGPYTDKEYYREFPTIFHLRKELILNKDKADIRLIYLALHNILKYRGNFTYEHQKFNISNLNNNLSKELIELNQQLIKYDISFPDDCDWNHISDILIGRGNATQKSSNILKDFTLDKETKKLLKEVINLILGNVAHLNTIFKTSLTKDEEKLNFSGKDIESKLDDLDSILDDDQFTVLDAANRIYSTITLNEILNGESYFSMAKVNQYENHAIDLCKLRDMWHTTKNEEAVEQSRQAYDDYINKPKYGTKELYTSLKKFLKVALPTNLAKEAEEKISKGTYLVKPRNSENGVVPYQLNKIEMEKIIDNQSQYYPFLKENKEKLLSILSFRIPYYVGPLQSAEKNPFAWMERKSNGHARPWNFDEIVDREKSSNKFIRRMTVTDSYLVGEPVLPKNSLIYQRYEVLNELNNIRITENLKTNPIGSRLTVETKQRIYNELFKKYKKVTVKKLTKWLIAQGYYKNPILIGLSQKDEFNSTLTTYLDMKKIFGSSFMEDNKNYDQIEELIEWLTIFEDKQILNEKLHSSKYSYTPDQIKKISNMRYKGWGRLSKKILMDITTETNTPQLLQLSNYSILDLMWATNNNFISIMSNDKYDFKNYIENHNLNKNEDQNISDLVNDIHVSPALKRGITQSIKIVQEIVKFMGHAPKHIFIEVTRETKKSEITTSREKRIKRLQSKLLNKANDFKPQLREYLVPNKKIQEELKKHKNDLSSERIMLYFLQNGKSLYSEESLNINKLSDYQVDHILPRTYIPDDSLENKALVLAKENQRKADDLLLNSNVIDRNLERWTYMLNNNMIGLKKFKNLTRRVITDKDKLGFIHRQLVQTSQMVKGVANILDNMYKNQGTTCIQARANLSTAFRKALSGQDDTYHFKHPELVKNRNVNDFHHAQDAYLASFLGTYRLRRFPTNEMLLMNGEYNKFYGQVKELYSKKKKLPDSRKNGFIISPLVNGTTQYDRNTGEIIWNVGFRDKILKIFNYHQCNVTRKTEIKTGQFYDQTIYSPKNPKYKKLIAQKKDMDPNIYGGFSGDNKSSITIVKIDNNKIKPVAIPIRLINDLKDKKTLQNWLEENVKHKKSIQIIKNNVPIGQIIYSKKVGLLSLNSDREVANRQQLILPPEHSALLRLLQIPDEDLDQILAFYDKNILVEILQELITKMKKFYPFYKGEREFLIANIENFNQATTSEKVNSLEELITLLHANSTSAHLIFNNIEKKAFGRKTHGLTLNNTDFIYQSVTGLYETRIHIE

SEQ ID NO: 497 - protein, 1313 aa, Lactobacillus fermentum
MHYLDEIFAPHLQEVDENFLRRLKQSNIHPEDPAKNQAFIGKLLFPDLLKKNERGYPTLIKMRDELPVEQRAHYPVTNIYKLREAMINEDRQFDLREVYLAVHHIMKYRGHFLNNASVDKFKVGRIDFYKSFNVLNEAYEELQNGEGSFTIEPSKVEKIGQLLLDTKMRKLNRQKAVAKLLEVKVADKEETKRNKQIATAMSKLVLGYKADFATVAMANGNEWKIDLSSETSEDEIEKFREELSDAQNDILTEITSLFSQIMLNEIVPNGMSISESMMDRYWTHERQLAEVKEYLATQPASARKEFDQVYNKYIGQAPKERGFDLEKGLKKILSKKENWKEIDELLKAGDFLPKQRTSANGVIPHQMHQQELDRIIEKQAKYYPWLATENPATGERDRHQAKYELDQLVSFRIPYYVGPLVTPEVQKATSGAKFAWAKRKEDGEITPWNLWDKIDRAESAEAFIKRMTVKDTYLLNEDVLPANSLLYQKYNVLNELNNVRVNGRRLSVGIKQDIYTELFKKKKTVKVSDVASLVMAKTRGVNKPSVEGLSDPKKFNSNLATYLDLKSIVGDKVDDNRYQTDLENIIEWRSVFEDGEIFADKLTEVEWLTDQQRSALVKKRYKGWGRLSKKLLTGIVDENGQRIIDLMWNTDQNFMQIVNQPVFKEQIDQLNQKAITNDGMTLREWVESVLDGAYTSPQNKKAIWQVVRVVEDIVKAVGNAPKSISIEFARNEGNKGEITRSRRTQLQKLFEDQAHELVKDTSLTEELEKAPDLSDRYYLYFTQGGKDMYTGDPINFDEISTKYDIDHILPQSFVKDDSLDNRVLVSRAENNKKSDRVPAKLYAAKMKPYWNQLLKQGLITQRKFENLTMDVDQNIKYRSLGFVKRQLVETRQVIKLTANILGSMYQEAGTDIIETRAGLTKQLREEFDLPKVREVNDYHHAVDAYLTTFAGQYLNRRYPKLRSFFVYGEYMKFKHGSDLKLRNFNFFHELMEGDKSQGKVVDQQTGELITTRDEVAKSFDRLLNMKYMLVSKEVHDRSDQLYGATIVTAKESGKLTSPIEIKKKRPVDLYGAYTNGTSAFMTIIKFTGNKPKYKVIGVPTTSAVGLKRVGKPGSESYNQELHRIIKSNPKVKKDFEIVVPHVSYSQLIVDDDCKFTLASDTYQHPATQLVLSKESMEIIADDFKFVKENTATADEQLVRVFDEIVNQMNHYFTIFDQRSNRQKVTKARDKFVSLPTESEYEGAKKTQVGKTEVITNLLMGLHANSAQGDLKVLGLSTFGFFQSSGGLNLSEDAMIVYQSPTGLFERRICLKDI

SEQ ID NO: 498 - protein, 1327 aa, Lactobacillus florum
MTEQQQPYNIGLDIGTSSIGWAVTDQNDKLLHIRGHNGIGVRLFKEGESAAERRGFRTTRRRLSRRRWRLRFLDRIFDAELAKVDPNFLARLKQSNISPLDPNKQMFGNILFDDPQFDDQKFHQQYPTIYHLRSALAQPDAPQADVRLIYLALHHMIKFRGHFLNGAAVEKFHGGQLHLESEFQELNQIFSNQQRDHVQLQTSSLDEVATILKDNQRTPSDRQRELSARLFVPVDKTIDKENKKLATELLKAVLGLKAKFDVILGVEATDPQAFKLQFSSDDFDDKIAELASELTDEANEILTVLQRLYFSLNLADILTNRQTKQVADSISTAMINRYDDHKHHLKMLKELEAQVTQEQRDGLKKAYDEYIDGDKPTIDTFYTNIKKNLDDSELANQIKSLIDLQAFMPKQRSKENGSIPHQLHQRELDQLIEVQGKYYPWLLAAKDKLDALIAFRVPYYVGPMIDPNQSDDPQNTKFAWMVRKEAGEITPWNFEEKVDKTSSATNFIKRMTTTDTYLLGEPVLPKNSLLYQQFTVLNELNKLKVNGKALTVDQKKYLYEHVCKKQRRVTLKKLSDCLMARGDFPMGAIFTGTTDQKNMNNTLKTYQDFQEIFGDEIDNPDRQVDFEKMIEWSAIFEDREIFKLKLAELNWLTSEQLERVSKKRYQGWGRLSQKLLTHIVNENGERIIDQLWNTNQNFMEIMGQDSVKQAIQEHNGANVAQTGINETIDELYTSPQNKKAIRQILLVVDDIKKAVGYAPANIMMEFAREDRDDHRLIASRARQLEKTYQEISKNWFDNESVTQELKDQIKNKTKFTDRLYLYFIQGGIDLYTGHPLNIDQLSSYDIDHILPQSFLLDNSLNNRVLTSQAENRVHKEDRLPGETVANKMRPTWKMMREQGLMTQRKYNNLTLKPDQISKFNNRGQFINRQLVETRQVIKLAADIMSQKYQADQTKVVTVKANLTHHMREKFNFYKSRNVNDYHHAFDAYLTLFVGNWLLKEYPKLQPYFVYGDFAKTGTNNLKSFNFLYRFERDHKLNDKGAIDTDKDQQLGYMKRIYRFKKMLVTKQLETNEGALYGQTLYPAPKNDKKTRNLINSKKNRPSDIYGGYSNENGSFLTLVKLKKGSKYDYRLVAVPVSKISEIKESELATIEKAIAPQFLKSSGKYRDFQVVLSKILINQKVIDDGMIFTIGSKSYKHNAKQVVLSDNSIQIVSTLSRISDKEKLITVFDEIVDITSKYLPWYKVNDVEKTKMLFRQMQDIDEMKKIIDNSLIGLHCNASITDLGKVGLSKYWGRFVLTAGISLTVDAQLIYQSPTGLFEHRVKVSDL

SEQ ID NO: 499 - protein, 1386 aa, Lactobacillus hominis
MTKITEDYIVGLDIGTNSCGWVAMDSKNTILRMHGKTAIGSHLFDAGNSAADRRAFRTTRRRIKRRKWRLKLLEEIFDSHLAKVDPYFFARLKESGLSPLDTRKNVSSIIYPTSLEDKKFYVDNPTIYHLRYKLMTEDRKFDLREVYLAIHHIVKYRGNFLYNTPVKAFEASKIDVKGSLKKLNELYEGLDSEFNVELDSNNALEIENIIRDKKIFKINKVKEINQLLSLKTEDKERTKLMKDVSKQIVNAILGYKTKFETILLKDVSKDEADDWEFKLTDVDADNKFENLIGDLNENEQEILLVIRKLANAITLSNIVEEGKTLSESMKDKYKKHSDDLKLLKQVISDHPDRDKAKKLALAYDLYVNNRHGKILQAKDILEKKKTLSKEDFYKEIKKNLDDSKESQEILDAISLDSFMPKQRTNENGVIPYQLHQLELDKIIENQGKYYPFLKEVNPVSSHLKQAPYKLDELIRFRVPYYVGPLISPNESTKNKQTKKNQNFAWMIRKEQGQITPWNFDQKVDRMASANKFIKRMTTIDTYLLGEDVLPANSLLYQKFTVLNELNNVKINGKRISVPLKQELYNNLFKKNSTVTTNKLKSYLKENYKLIKVEIKGLSDEKKFNSGLTTYNKLKNLKIFDQQIDDPNYNKDFERIIEWSTIFEDKAIYKEKLKTIDWLSDRQIDKLSKIRMQGWGQLSKKLLSQLTDNNGQTIIEQLWDSQNNFMQIVNQADFKDAIAVANQNLLVDTSVEDILNEAYTSPANKKAIRQVVKVVDDIVKATSGKVPKQIAIEFTRDADDNAKISQSRANKLRKVYKEMSNELASETIRNELERVAKDQKLLKDKHYLYFMQLGRDAYTGELIDIDNLEQYDIDHVLPQSFIKDDSLENRVLVKKAVNNGKSDNVPVKLYGNRMATDLGMTIRHMWEKWKEQGLITKTKYNNLIIDPDKINKYESSGFIHRQLVETSQIIKLVSTILQSKYPDTEIIVVKARYNHYLRKRLNLYKSREVNDYHHAIDAYLSAICGNLLYQVYPYLRPFFVYGQYKKFSSEPEKEKIIYDKTRRYNFISQIFENKDNDIISRETKKKVFDKKDIIEKLKRAYNYKYMLVSRETETHDQEMFKMTVYPRLSRDTKKSRNLIPKKKDMPTEIYGGYTNNSDAYMIIARINKKKGPEYRVFGVPMRELVNLRKAEKNGHYKAYLKQVLEPEIMYSKNGKKNKTISSFEIVKAKVPYKQVILDGDKKFMLASSTYVQNAKQLTLSQYSMQAITDNCENDTEEEKALVEAYDEILTNIDKYLPLFDINKFREKLHAGREKFVDLPLAEKKETILQVLNGLHDNAVMPKIKSLGLSTPLGFMQFHTGVSLSENAKLIYQSPTGLFEKRLKISDL

SEQ ID NO: 500 - protein, 270 aa, Lactobacillus iners
MITYLKDNDDITLSFPKDQLINIFKNSNLNSTEKSDQLKPFFGRTNLEKGIIKLLSGGKQDLSNMFRDETLKNSNYKNLKFSDNRFDDERDGYAADLGDRIDLLILLKQIYDASILESMMSQARVSIDGHKYISSAKVCAYEKHKSDLKRLKSLIKKYLPSEYNNIFRKITEKDNYVAYSKSNITNNKREKALKYVKYVDFTKYLTKKLKTIKTQDAEDDQEIFEIKGELEKQSFLPKQRTLDNSIIPYQLHLMELKKYLIINLNIMTFC

SEQ ID NO: 501 - protein, 255 aa, Lactobacillus iners
MITYLKDNDDITLSFPKDQLINIFKNSNLNSTEKSDQLKPFFGRTNLEKGIIKLLSGGKQDLSNMFRDETLKNSNYKNLKFSDNTFDDERDGYAADLGDRINLLILLKQIYDASILESMMSQARVSIDGHKYISSAKVCAYEKHKSDLKRLKSLIKKYLPSEYNNIFRKITEKDNYVAYSKSNITNNKREKALKYVEYVDFTKYLTKKLKTIKTQDAEDDKEIFEIKGELEKQSFLPKQRTLDNSIIPYQLHLME

SEQ ID NO: 502 - protein, 343 aa, Lactobacillus iners
MLAKDDQEGITVKDKIISLLTFRLPYYIGPVNPAVHGKFAWVKRLANGKVTPWNYKEKIDIDASHEEFIKTKLSKCSFLIGCDVLPKNSLLYQKYMVLSELNTIKFNGVNISEKLKDDIYQNLFKNIQKVTKKRLQNYIKEHENIIGDVIVTGIDNAFKQGLVSYLKFKKIIGDKIDDDRYQKVLEKIIRDITLYDECAGKKIKKEYKDSDLFTEDELNKIVKLTFNDWGRLSAELLDQLEGEDTVSGETGKIIEFMQKHNYNLMQLMSKKFTFKYKIDEINKSYYQHDKFNYKSMIDSLYVSPATKRILWQSLKVVHEISKIMKHDPEKIFYRNGTFQRRSS

SEQ ID NO: 503 - protein, 447 aa, Lactobacillus iners
MLYDHKLIGDKKYARLIRSKAFTDDELAGFIARQLVETRQATKETADLLKRLCPKSRIVYAKAQNASIFRQKFDIPKSRTINDLHHAQDAYLNIVVGNIFDTKFTQDPRNFIKNTKDSRNYNLEKIYDYNVERNNYVAWIAPDSKTNGTIANVKCNLSTKDFRVTRPSFYKKGALFNQNLSRKGSNLAPIKEHSPKSNPLKYGGYSGKNNSFFVVVAGKDNKGKDIVKLIPVNTLIYNKMLHCDYKAKQELLTSYVANNFAINNFRIVKDDIKMYSLVKIDGAYYYLVGGTDERIEVKNAMQLLLSKDSIKAVKILEKESKDQFANIKNYKDIDIKLGRTFNEVISKYTNSVFGKSMLISDKYRKDIFKSVDKSILEFNSLNTIAKADNLLKFVTSMRPAGSVDALKMVGLIERIRKSNVISNFNEFKLINQSVTGLFENEEDLLKL

SEQ ID NO: 504 - protein, 667 aa, Lactobacillus iners
MQKHNYNLMQLMSKKFTFKSKIDEINKSYYQHDKFNYKSMIDSLYVSPATKRILWQSLKVVHEISKIMKHDPEKIFIEMARSKEDHPKRKLSRKADLKQVYKDSKKQIISIIGKDKYQDLSNELDNKDDRDLRWDNLYLYYTQLGRSMYSLKPIDISELMNKNLYDQDHIFPKSKKYDDSIENRVLVEKELNVKKSDIYPISDANIIPQKIKGQVESFWKMLYDHKLIGDKKYARLIRSKAFTDDELAGFIARQLVETRQATKETADLLKRLCPKSRIVYAKAQNASIFRQKFDIPKSRTINDLHHAQDAYLNIVVGNIFDTKFTQDPRNFIKNTKDSRNYNLEKIYDYNVERNNYVAWIAPDGETNGTIANVKCNLSTKDFRVTRPSFYKKGALFNQNLSRKGSNLAPIKEHSPKSNPLKYGGYSGKNNSFFVVVAGKDNKGKDIVKLIPVNTLIYNKMLHCDYKAKQELLTSYVANNFAINNFRIVKDDIKMYSLVKIDGAYYYLVGGTDERIEVKNAMQLLLSKDSIKAVKILEKESKDQFANIKNYKDIDIKLGRTFNEVVSKYTNSVFGKSMLISDKYRKDIFKSVEKSILEFNHLDTIGKADNLLKFVTLMRPSGSAHSLKMVGLIERIRKSNVISNFNEFKLINQSVTGLFENEEDLLKL

SEQ ID NO: 505 - protein, 1395 aa, Lactobacillus jensenii; identical to SEQ ID NO: 118

SEQ ID NO: 506 - protein, 1382 aa, Lactobacillus mucosae
MDIGTNSIGWTAIDDHFSLLRVKGKNAIGVRTFKEGETAADRRGFRTARRRLSRRRWRLQFLDEFFAPYLAEVDPNFLARLKQSDISAKDPAKNQEYMGKLLFPDQEAASDGNGYPTLIQMRKAMPAEKAADFPVFNIYQLRYALMNEKRKFDLREIYLAVHHIVKYRGNFLNNTSVDKFKADQIDFNKSFETLNDLFRQVQPIAPFQIDLTKVDELGKLLLDTKQKKLDRQKAVAKLLPLIEDGTDKEIVKAHQQTAREISKLILGYKAKVGLILQNNLDQTLDMSTENSDDQLMQIAEELDDYQMELINQLSLLYSQIMLNEIVPNGETVSASMLNRYYKHRCQLKELKDYGAAQDKKTREQLDHLYAEYIGQIPKDSKFDFTKDLKKLMDKSDLGQKIKDEIEAGDYLPKQRTSANGVIPHQMHQQELDQIIENQKEYYPWLAEPNPVEKNIKNAKYKLDQLVSFRVPYYVGPMITLADQQKTSKASFAWAVRKKAGKITPWNFYDMIDREKSANNFIKRMTNKDTYLLSEDVLPASSLLYQKFTVLNELNNIRVNGRKLQPALKQAIYTDLFQKRKTVNLKTLTNFLAIHEPTLTKPKIEGLSNGRSFNSSLGTYIDMSKILGDSLDDLNYRDDIEKIIEWSTVFEDSEIYGVKLQEIQWLTNEQREKLVRKRYQGWGRLSKKLLTGITDENGQRIIDLMWDTSKNFMQIVHQPVFEEQIAELNQQLLQDADKAPLEVVDDILADAYTSPQNKKAIRQVVKVVADVVKAVGNAPASISIEFARNEDRNKELKNSRRHSIEKLYHETAEKLVKQTNLLEELGNVKDLNDRYYLYFTQAGRDMYDGTPINIDEISTHYEIDHILPQSFLKDNSLDNRVLVKKSENAAKSDRVPAKLYGAKMRAFWKQLKESQLISNRKYLNLTTDPEQVDKYQMQGFVHRQLVETRQIIKLAANIFGSLYPDSAVIETRAELTKQLREKFSLYKVRDVNDYHHAVDAYLTAFAGHYLYQRYPKLRPMFVYGDYAKIYADDLKRLRSVNLFHDLEKDQYNSGTAVNPETKEKIVDVDWLSDYVSKIQHFKYMLISKAVYTQHGQLYGATILPVAQVDKISAPIGIKDDKPVDIYGAYTNEVAAYMAIVRVNGKKPKYKVVSVPVRMLQRLKMAEQKGHDQYMQTLHDVLLRNFTSLKKNRKTGLKEAVVKDFDVLVPCVRYNQLVIDGDTKFTLGSATYQHNAKQLVLCNHSLETLANNFEYVRKHPDEADERMIMLYDDILDQVNHYFTLYDKNKFREKLNAGRDKYLKLPTFSQFENNKKTAIGKSEAIINILRGLHANAAITNLKCLGVSTPFGQLQSPSGIELSENAKLVYQSPTGLFSREVLLKDL

SEQ ID NO: 507 - protein, 1382 aa, Lactobacillus pentosus
MKKIVNYNLGLDIGTSSIGYAAIDDQGRPVRHQNKTVMGVRLFKEGKTAESTRIFRGTRRRLSHRHWRLGYLDRIFDNEIAKVDENFLPRLKASKRARSDEKRSFRGSLLFPETGDDAYYQKYPTIYHLRYALITQKKQFDIRLIYLALHHMIKYRGNFLDTTPVSAFNIHDIDLTDQFASLNDCYQLLDMDFEFQFDLNNIEQVQKLLLDETLSKTKRQAAVSKVLVMSTGNKAFDDQQNGIASEFIKALLGGPFDLSKILNLSVADVKSWKLHMTDKDVDDTLNSLVEELDENHKQIVNLLQMIYSQVMMLGLLNGQQSISASMIERYDDHAKHWAALKKLLPALGEQEQSTIIHAYTAYTGHSRTKQLSRAEFYTKVNSILKKHENIAEATGLIELIDRNEFMPKQRDAVNGVIPHQLHQRELQLIIQNQQKYYPFLAAKAYPDADETMIEQLLSFRVPYYAGPLVDRDFINESSDQEQAMQNTKFSWLKRREAGEITPWNFEQKVDVQETANRFIKRLTTKDTYLMTEDVLPKESLIYQRFEVLNELNAIRINDRRLTAENKQLAFQQLFMAGNTKNVSIKKFRNFVFDSLKFPEKVKITGFAGQHNFLAKLSTYHDFKKIFGERVDHTDLQPDFERIVEWCTIFEDRHIYREKLKEIQWLSQSEIDQLVLIRNHGWGRLSKRLLTGIRDSDGRTVMDQLWFGTDNFMRIISQSDFAAAIANENRTQLNQHGLEDVLDSAFMSPQNKKAIRQVLKVVDDIEQTLGCPPKKVMIEFTRSPDKKKQRTVTRLEKVQQAYKAVADQLAGQSIVSELDQYANTHSKLSDTYYLYFMQLGRDLYSGKPIDIDSPMLDDDHILPRAFMKDNSLDNRALTEKPINNTKAAKFPSKVFGQQKEVTDFWKLLRRCGLMSNIKEKHLYLDPDNVDKWTRRGFIHRQLVETSQVIKIVANILNDRYQQSQTEVLEVPARLGTELRECFGWYKVREVNDYHHVFDAYLAAFIGNYLYRRYPKLQPYFVYGNFAELNKAQLKNIKSFNFLYNITDNKRVVKDIETGQTLWDDQIRQQIQHIYEYKYMLTSHEAFTQHKELYGQTIYPRREFKPGTLKAIKQDQPQELYGGYKNLTAAYMCIVKIQARKRRAAEYRVVRVATESLSALQQAKRLGVQAYERCLRQELVRNNEILRTNADPNSAPREFEVLLDRVLCHQMIISDGQKYLLGSHAYKINCMQLVLSNNSMKILSTSIVKLKQMTNEPLVQVYREILDVVNKYFTLYDVNSFRENLNQFFDKFRTLPITNEYESSKSGKKLIHRGQLETLTLILRGLHANSDKVQYGDQSTLLGGFQTKDGIKLSKDSVIQYTSPAGLNVRTVKLRDLEQKEAQK

SEQ ID NO: 508 - protein, 1361 aa, Lactobacillus pentosus
MNEPYGVGLDIGTNSVGWTVVDMNGRVRKVKGKTALGARLFKEGATAEDRRGFRTTRRRLKRVKWRLRLLREFFDQPISKIDPNFFARRKYSDISPRDPNYNGLAKTLFNDRTDKEFYDDYATIYHLRDKLMTSNRKFDIREIYLAIHHIVKYRGNFLRTGPASQYGSASLHLATSFQKLNDLFAQSEETLNLKLVTDEALLQQIQQILVRTDLSRSEQQRQIWPLMAVLTGASAAEKKRQKNVVVELSKALVGLKAKMNVVTLTEVDAAVVKDWTFTMEESQDKLPEIEEQLSEVGQQIMDEVIQLYASVNLAQLIPAGKRFSQHMVEKYKHHEKNLELLKAYIHSQSDSKRGREIRATYDRYIDGVDSKPVTQEMFYKDLMKYVEADATSNHLAAEIKDEIDSEQFMPKLRTKQNGSIPYQVQQYELDQIISHQKKYYPWLGEENPVAERRGKFPYKLDELVGFRVPYYVGPLITKEDQQATSGAGFAWMVRKADGPITPWNFDQKVDRIASATAFIQRMQTTDTYLIGEDVLPARSLIYQRFMVLNELNNMRVEDRKLAPQQKQRLYNQVFKQHQHVSVKNIQQNLMDAGEYRKTPQITGLADPKGFNSSLSTYHDFKKILLEAIADEHKRADIEKIILWSTTFEDSAIFKQKLEEVAWLTDAQRKQLSGLRYRGWGQLSHKLLTAFKDDKGRSIMDGLWETSDNFMQLRKQPAIETQIKEANQANLTDADIQDTINELYTSPQNKKAIREVMLVLDDIKNAMHGQTPSWIFVEAARGGGVAGRRTQSRSSQIVEAYKGTAKEIVSEKVQHELNEKIKAKADFNTRLVLYFLQNGRDLYTNEAINIDRLSEYDIDHILPQSLVKDDSLDNRVLTSARINREKNDTFASEKFGRKMGAQWRELHRNGLMTQRKLKHLLMRPDEISKHATDFINRQLVETRQVIKLVEELISSEYPAASIVAVKANLTHQFRQTFNFPKLREVNDYHHAFDASLTAFIGMYLLKQYPKLERFFVYGKFAKQPINLTRFNIIRKLAVAEKPIANIETGEILWDKTADIKYFEKLYNYKRLLVTHEVRENYGAMFKQTLFKASYNKSKTLVPKKNHMETSVYGGYSNQETAYLAIVRIPFKSGFKFIVVGIPTRMVAKIKHYQSLGATLNQATHKVIEPKFTKISRKTKQTVISDYEVVLPKVYLDQVVRDQVKGQMYRFSLGSDKEYHNVQELYLPLSIQQAFVGHYDESDDQRSNDLVKVYDAALKQLQRYFPLHLSRNFDQVASQAHQSFEGLKNNVQTSDKQLGKKEVLNSLFVGLHANATRSNLSVLGMSKDFGRIKSNGITLTDQAEIIYQSPTGLFERKVALKDL

SEQ ID NO: 509 - protein, 1358 aa, Lactobacillus pentosus
MNEPYGVGLDIGTNSVGWTVVDMNGRVRKVKGKTALGARLFKEGATAEDRRGFRTTRRRLKRVKWRLRLLREFFDQPISKIDPNFFARRKYSDISPRDPNYNGLAKTLFNDRTDQEFYHDYPTIYHLRDKLMTSDRKFDIREIYLAIHHIVKYRGNFLRTGPASQYGSASLHLATSFQKLNDLFAQSEESLNFKLVTDEAQLQQIQQILVRTDLSRSEQQRQIWPLMVVLMGATAAEKKRQKDFAKELANALVGLKAKLNVVTLTNVDTTVVKDWTFTLEESQDKLPEIEEQLSEVGQQIMDEVIQLYASVNLAQLIPAGKRFSQHMVEKYNHHEKNLELLKAYIHSQSDSKRGREIRATYDRYIDGVKSKPVTQEMFYKDLMKYVEADATSNHLAAEIKDEIDSEQFMPKLRTKQNGSIPYQVQQYELDQIISHQKKYYPWLGEENPVAERRGKFPYKLDELVGFRVPYYVGPLITKEDQQATSGAGFAWMVRKADGPITPWNFDQKVDRIASATAFIQRMQTTDTYLIGEDVLPARSLIYQRFMVLNELNNMRVEDQKLAPRQKQRLYNQVFKQHQHVSVKNIQQNLMDAGEYRETPKITGLADPKGFNSSLSTYHDFKKILPEAIADEHKRADIEKIILWSTTFEDSAIFKQKLEEVAWLTDAQRKQLSGLRYRGWGQLSHKLLTAFKDDNGRSVMDGLWETSDNFMQLRKQPAIETQIKEANQANLTDADIQDTINELYTSPQNKKAIREVMLVLDDIKNAMHGQTPSWIFIEAARGGGVAGRRTQSRSKQIVEAYKSTAKEIVSEKVQHELNEKIKAKADFNTRLVLYFLQNGRDLYTNEAINIDRLSEYDIDHILPQSLVKDDSLDNRVLTSARINREKNDTFASEKFGRKMGAQWRELHRNGLMTQRKLKHLLMRPDEISKHATDFINRQLVETRQVIKLVEELISSEYPSASIVAVKANLTHQFRQTFNFPKLREVNDYHHAFDASLTAFIGMYLLKQYPKLERFFVYGKFAKQPINLTRFNVIRKLAVAEEPIANIETGEILWDKTADIKCFEKLYNYKRLLVTHEVRENYGAMFDQTIFKATDSRKRLIQKKKGFATETYGGYTGRTLAYLAIVKVVTNKDTQYQVVGIPTTMVTQIQQLEASGLTSKQAVTKAIGAMINENNKKLQSYEVLLPKVRFEQVVRDEVKGHIHRFALGTDTYYHNIQELYLPLTIQRAFLGKRNDTDAQTEQNLLTVFETTLAQVNRYFPLYEMNKFKQILNSAQEKFAALPTKNKTVKNKLVTGKDGVLNNLFIGLHANASLGDLKILGMKIGFGKLQVPGGLKLTDQAEIIYQSPTGLFERKVALKDL

SEQ ID NO: 510 - protein, 1358 aa, Lactobacillus plantarum
MKEPYGVGLDIGTNSVGWTVVDASGHVRKIKGQTGIGVRLFKEGAAAADRRGFRTTRRRLKRVKWRLRLLREFFDQPISKVDINFFARRKYSDVSPRDPNYNGLEKTLFNDRSDQDFYHDYPTIYHLREALMTQHRKFDVREIYLAIHHIVKYRGNFLRNDAATAYRSGTLDLQQHFETLNHLFSQADLELNLNLTTDVALLDSIKQTLVRTDISRSDRQKLIMPLLAVLTGATTAEKKRQKAVVTEFAKALVGNKTKIDVLTLTDIDATEAKDWAFSLEENQDKLPGIEDRFSEVGQQIIDEVIRLYASVNLAQLIPEGKRFSQSMVEKYKRHGEDLKLLKAYIRSQSDAKRGRAIRATYDQYIDGVKSKQVTQEAFQKALGKFVDADVDLNSWAAQIKQAIDSEQFMPKLRTKQNGAIPYQVQQNELDQIISNQKEYYPWLGEENPVIKRRGKFPYKLDELFGFRVPYYVGPLITKEMQAATANAGFAWMVRKADGPITPWNFDDKVDRVASATAFIQRMQTTDTYLIGEEVLPARSLIYQRFMVLNELNNIRVDDGQLTPRQKQRLYNQVFKKHKRVTAKNIQDNLVAAREFPTAPRITGLADPKVFNSSLSTYHDLKQVLPEAMSDVRKQADIEKIILWSTIFEDSTIFKQKLTEISWLTAAQLKQLGQLRYRGWGQLLRKLLTGLKDDNNRSIMDGLWETNANFMQLRSQPAIENQIKSANQANLTTADLQDTINELYTSPQNKKAIREVMVVLADIKDAMHGQTPNWIFVEAARGGGVAGRRTQSRSKQIVAAYQGTAQAIVRDQVQRELKEKIKNKANFNTRLVLYFLQNGRDLYTGDAINIDRLSEYDIDHILPQSLVKDDSLDNRVLTNARINREKNDTFASEKFGKKMGAKWKEMHRMGLMTKRKLDHLLMRPDEISKYATGFINRQLVETRQVIKLVEELINAEYPSTAIVSVKANLTHQFRQTFDFPKIREVNDYHHAFDAALTAFIGTYLLKRYPKLERFFVYGKFAKQPVNLTRFNVIRKLAKTDTPITDIDTGEVLWDKLTDIKYFETLYDYKRLLVTREVSENYGAMFDQTLLKASDNGKRLIRKKQSFDTAIYGGYTGKTLAYMAIVKVSTKKDVQYQVVGVPTTMVTQIEQLEQQGMTNKQAVTKVIEPLIAANNKKMLTYEVLLPKVRFEQVVRDRIKGQTHRFALGTDTYYHNIQELYLPLTLQRAFLGKQNESEVQLNQNLLTVFDATLAQVNRYFPLYEMNKFKKILNSARDQIELLEAKNQFVKNKLVLGKQGILTNMFIGLHANASYGDLKVLGVKIDFGKLQVPGGIKLTGDAEIIYQSPTGLFERKIALKDL

SEQ ID NO: 511 - protein, 1361 aa, Lactobacillus rhamnosus
MTKLNQPYGIGLDIGSNSIGFAVVDANSHLLRLKGETAIGARLFREGQSAAERRESRTTRRRLSRTRWRLSFLRDFFAPHITKIDPDFFLRQKYSEISPKDKDRFKYEKRLFNDRTDAEFYEDYPSMYHLRLHLMTHTHKADPREIFLAIHHILKSRGHFLTPGAAKDFNTDKVDLEDIFPALTEAYAQVYPDLELTFDLAKADDFKAKLLDEQATPSDTQKALVNLLLSSDGEKEIVKKRKQVLTEFAKAITGLKTKFNLALGTEVDEADASNWQFSMGQLDDKWSNIETSMTDQGTEIFEQIQEHYRARLLNGIVPAGMSLSQAKVADYGQHKEDLELFKTYLKKLNDHELAKTIRGLYDRYINGDDAKPFLREDFVKALTKEVTAHPNEVSEQLLNRMGQANFMLKQRTKANGAIPVQLQQRELDQIIANQSKYYDWLAKPNPVEKHRASKPYQLDELLTFRIPYYVGPLITPKEQAESRENVFAWMIRKDPSGNITPYNFDEKVDCPASANMFIQRMKNTDTYLIGEDVLPKRSLLYQKYEVLNELNNVSIDGRRLGADQKQRLIREVFERHSSVTIKQVAENLVAHGDFAKRPEIRGLADEKRFLSSLSTYHQLKKILHEAIDDPTKEHDIENIITWSTVFEDAAIFKTELAKISWLDSDTIKALSNIRYRGWGQFSRKLLDGLKLGNGHTVIQELMLSNHNLMQILTDETLKTTMAELNQDKLKADDIEDVINDAYTSPSNKKALRQVLRVVEDIKHAANGQDPSWLYIETADGPGTAGKRTQSRQKQIQTVYANAAQELIDSAVRGELEDKIADKASFTDRLVLYFMQGGRDIYTGAPLNIDQLSHYDIDHILPQSLIKDDSLDNRVLVNATINREKNNVFASTLFASKMAATWRKWHEAGLISGRKLRNLMLRPDEIDKFAHGFVARQLVETRQIIKLTEQIAAAQYPNTKIIAVKAGLSHQLREELDFPKNRDVNHYHHAFDAFLAARIGTYLLKRYPKLAPFFTYGEFAKVDVKKFREFNFIGALTHAKKNIVAKDTGEIVWDKERDIQELDRIYNFKRMLITHEVYFETADLFKQTIYAAKDSKERGGSKQLIPKKQGYPTQVYGGYTRENTAYLAVVKTVEKKADVYRVVRIATSQVAALKEARAQSTVKERELLKKFLTTKFTKIGKNGKKAITPFDIVIPRVPREQLFHNKRYGFFMVNSDTLMHNYQELWMSRSDQQILSKLVKSAKTVENGQVGRLFENIVEQINKYFPLYDINQFRKKLDQSKDIFSKLPLEGNGTTSGKRETIQNILTGAGTGAKNGDLKNLGIKTPFGFLQVPSGIVLDDDTTLIYQSPTGMLNRIVRLSEL

SEQ ID NO: 512 - protein, 1361 aa, Lactobacillus rhamnosus
MTKLNQPYGIGLDIGSNSIGFAVVDANSHLLRLKGETAIGARLFREGQSAAERRESRTTRRRLSRTRWRLSFLRDFFAPHITKIDPDFFLRQKYSEISPKDKDRFKYEKRLFNDRTDAEFYEDYPSMYHLRLHLMTHTHKADPREIFLAIHHILKSRGHFLTPGAAKDFNTDKVDLEDIFPALTEAYAQVYPDLELTFDLAKADDFKAKLLDEQATPSDTQKALVNLLLSSDGEKEIVKKRKQVLTEFAKAITGLKTKFNLALGTEVDEADASNWQFSMGQLDDKWSNIETSMTDQGTEIFEQIQELYRARLLNGIVPAGMSLSQAKVADYGQHKEDLELFKTYLKKLNDHELAKTIRGLYDRYINGDDAKPFLREDFVKALTKEVTAHPNEVSEQLLNRMGQANFMLKQRTKANGAIPVQLQQRELDQIIANQSKYYDWLAKPNPVEKHRASKPYQLDELLTFRIPYYVGPLITPKEQAESRENVFAWMIRKDPSGNITPYNFDEKVDCPASANMFIQRMKNTDTYLIGEDVLPKRSLLYQKYEVLNELNNVSIDGRRLGADQKQRLIREVFERHSSVTIKQVAENLVAHGDFAKRPEIRGLADEKRFLSSLSTYHQLKKILHEAIDDPTKEHDIENIITWSTVFEDAAIFKTELAKISWLDSDTIKALSNIRYRGWGQFSRKLLDGLKLGNGHTVIQELMLSNHNLMQILTDETLKTTMAELNQDKLKADDIEDVINDAYTSPSNKKALRQVLRVVEDIKHAANGQDPSWLYIETADGPGTAGKRTQSRQKQIQTVYANAAQELIDSAVRGELEDKIADKASFTDRLVLYFMQGGRDIYTGAPLNIDQLSHYDIDHILPQSLIKDDSLDNRVLVNATINREKNNVFASTLFASKMAATWRKWHEAGLISGRKLRNLMLRPDEIDKFAHGFVARQLVETRQIIKLTEQIAAAQYPNTKIIAVKAGLSHQLREELDFPKNRDVNHYHHAFDAFLAARIGTYLLKRYPKLAPFFTYGEFAKVDVKKFREFNFIGALTHAKKNIVAKDTGEIVWDKERDIQELDRIYNFKRMLITHEVYFETADLFKQTIYAAKDSKERGGSKQLIPKKQGYPTQVYGGYTRENTAYLAVVKTVEKKADVYRVVRIATSQVAALKEARAQSTVKERELLKKFLTTKFTKIGKNGKKAITPFDIVIPRVPREQLFHNKRYGFFMVNSDTLMHNYQELWMSRSDQQILSKLVKSAKTVENGQVGRLFENIVEQINKYFPLYDINQFRKKLDQSKDIFSKLPLEGNGTTSGKRETIQNILTGAGTGAKNGDLKNLGIKTPFGFLQVPSGIVLDDDTTLIYQSPTGMLNRIVRLSEL

SEQ ID NO: 513 - protein, 1352 aa, Lactobacillus ruminis
MNDNFDLMRVKGKKGIGVRLYNEGQSAAERRMHRTARRRYGRRKWRLRLLEDFFDEHMAEVDDTFFARLKDSNISPKDDKKYRKSLLFPKSKGVTYQDDGEFYKKYPTMYHLRYALMTEHRKFDLREIYLAFHHMVKYRGNFLYDTSVDSFEAKNLDIKGKFDEINDLLSSYTDFYVDNSNAALVESILLEKNTTRKDKSKKIAKLLHVEDKEKGKNKKAKDLATQISNAVLGLKCNFHLIFELQQKYSFDLCSEKTEENIAKLSEVLDENQKMLLMILKEVQDQVMLNAFVPSGMSLSEAMMQKYDDYGEQLKIYHELEHSVSDDSAAKLRGAYRDYNDNIIKRIDGDNKKDTFYKRVKNILTKISKEYVDQDVLESCGKLKKLIDENKLFIRQRTAANGVLPHQLHQIEMRKIIDNQKEYYPWLAEPNPNEKRRVYSKYKVEELIAFRIPYYVGPLVDPNNADKNKEARFSWMVRKKDGEITPWNFYDKVDWAESANNFIERMKSKDTYLLGEDVVPKESMLYQKYEVLNELNNLRINDSGLSDSFEDVKLKQAIYNDLFKKQKIVKITDLQNYLVQNHKYLVKPKISGLADENRFLSSLSTYSDLKTIFGDKVDDRTYFNDFEKMVEYSTVFEDGHDYNQKLDEYTWLTKEEKYKIGKKRYRGWGKLSKKLLTGLRDKNNHTIMDNLWETNRNFMQIQTADEFSKQIAEENERHLKGSVSDAINDMYTSPANKKAIRQVLRVVDDIQKAMGYAPSSISLEFAREDGPSVRTVSRANRMKSIYEKYASEVSEEVMKDLDGVIKDKKGLNDRLYLYFEQQGKDMYSGHPLDFDKVISGQEYDIDHILPQAVIKDDSLDNRVLTTKALNNDVKSKGVPCRMFNGMHSFWKNLYDKGFISRRKFNNLTTNPENIDKYKMKGFVNRQLVETRQIIKLVANVLNDKYQNDDVDIIEVRAELTHDVRKHFKFYKNRNVNDYHHAFDAYLTSFIGHYLFKKYPNLRPLFDYNDFMKVSDNVFKQLRGNNFLGEFLNKTGDIISTDGNFVLNKEEMINKLNKAYAFKKILVTKEVGQRTGAMFNETRYPAPNSRKAALKYRRMPKPDSLISVKDYKNTDIYGGYSGKNDAYMVIVDMGKQYMVVGVPVRYTEKLDKLRIKHSELYRDELRKVLSRDKTLLDSKGNVKRFDIVLDRVLYGQLIEDGNELFTLGSSKYKRNFRQLFLDKQCIEILDSSATPQPTDEELIWVYDQILDKVDKYFELYDINRQRETLRKGRAAFCSLPNISMKKDDVTKKKILNEILVALHANESESNCEKIGKKVFGRLQVPGGIKLSKEAKLIYQSPTGLFERVVYLKDL

SEQ ID NO: 514 - protein, 1339 aa, Lactobacillus salivarius
MERYHIGLDIGTSSIGWAVIGDDFKIKKKKGKNLIGTRLFNEGATAAERRGFRTQRRRLNRRKWRLKLLEEIFDPYMAEVDEYFFARLKSSNLSPKDSNKKYLGSLLFPDKSDSNFYDKYPTIYHLRRDLMEKDEKFDLREIYLAIHHIVKYRGNFLEKVPAKNYKNSGASIGFLLEEVNSLYKDIIGDESIAILNSEKFEDVEKIILDEETRNLDKQKSVGKLLVEDKKKKNIVTAFSKAIFGYKFNIEDLLLIENDEKNKLTFNDENIDDIFNELSHSLDDKQMDLLTKTREIYFKFKLNMIVPTGYTLSESMIEKYEMHKAHLKMYKEFINTLNTKDRKILKNAYSDYINTEKAKAANAQENFYKTVKKIIKDNNSDTAKKIIVLIDEGNFMPKQRTGENGVIPHQLHQIELDRIIENQAKYYPWLAEANPVEKNRKFAKYKLDELVTFRVPYYVGPLIDKTESNKNEKETKFAWMVRKAKGTITPWNFENLVDRTESANRFIKRMTSKDTYIIGEDVLPASSLLYEKFKVLNELNNIKVNEKKLDIEQKQDIYLNLFTTAKNVTKKSLATYLNCSADSISGLSDGEKFNSSLSSYIDLKAILGNIVDDCNKNEDLEKIIEYSTVFEDGNIYKEKLSEISWLTDEQIEKLSNIHFKGWGRLSKKLLTQITNENGERIIDALWNTSNNFMQIINDESIQAKLAEINGKYAGKSDLEDILSEAYTSPQNKKAIRQVMKVVEDIEKAMQCEPTSISIEFTRKKQKSRLTNTRYKKISDVYEKIADEVISEYELRKLQSELDSNANNMRDRYYLYFMQLGRDMYTGEKINIDELHQRYDIDHILPQSFIKDDSINNRVLTRKDVNNKEKSDKTAADLYAVEMSDFWRKLRKQGLITEQKYKNLLTKSDSIDKYAKKGFIKRQLVETSQVVKLVANILQDKYSDTKIIEVRAKLNSNLREEYKLIKNRAVNDYHHAIDGYLTTFIGQYLYKTYPKLRSYFVYNDFKKLDSNYLKHMKKFNFLWQLQDDKTIDIYDNVNNKFVLNVPEMKKYIQKIYNYKYMLVSKEVTTKNGAFYDQTKYNAKTVNLIPIKKNKPTNIYGGYKGKVSSYMMLVKIRKKKEVIYKFVGVPRLWTDELDRLKDTTERKILLNEIAKNSLSKTEQDFEVILDKVYYGQLIIDGNQKYTLGSSEYKYNAMQLHLSKHALEVLAKENVKDAEITDKDLVSVYEEILSVVNKYFELYDINKFRQKLNEGLEIFRKLPVYNVYESNKIKQVGKFEVLNRILMGLHANAMITDLKVLGIKTKLGQMQVNGGIKLSPDAKLIYQSPTGIFSRAVRVKDLG

SEQ ID NO: 515 - protein, 629 aa, Lactobacillus salivarius
MERYHIGLDIGTSSIGWAVTGDDFKIKRKKGKNLIGTRLFKEGNTAAERRGFRTQRRRLNRRKWRLKLLEEIFDPYMAEVDEYFFARLKDSNLSPKDSNKKYLGSLLFPDISDSNFYDKYPTIYHLRRDLMEKDEKFDLREIYLAIHHIVKYRGNFLENVPAKNYKNSGASIGFLLEEVNNLYKDIVGDENVTILNSEKFEDVEKIILDDGIRNLDKQKGVGKLLVEDKKNKNLVTAFSKAIFGYKFNIEDLLLVEGDEKSKLTFNDENIDDIFNELSHSLDDRRMDLLTKTREIYFKFKLNMIVPTGYTLSESMIEKYEIHKAHLKMYKEFINTLNSKDRKILKNAYTDYINNEKAKAANAQENFYKTVKKTIKDNDSDIVKKIIDLIDEGNFMPKQRTGENGVIPHQLHQIELDRIIENQAKYYPWLAEENPVEKNRKFAKYKLDELVTFRVPYYVGPLVDKTESNKNEKETKFAWMVRKSKGTITPWNFENLVDRTESANRFIKRMTSKDTYIIGEDVLPASSLLYEKFKVLNELNNIKVNEKKLDIEQKQNIYLKLFTTTKNVTKKNLATFLNCSIESISGLSDDKKFNSSLSSYIDLKVILGDIVDDYSKNEDLEKIIEYSTIF

SEQ ID NO: 516 - protein, 897 aa, Lactobacillus salivarius
  VARIANT 822: note = Xaa can be any naturally occurring amino acid
MLIESDEKNKLTFNDENIDDIFNELSHSLDDNQMDLLTKTREIYFKFKLNMIVPTGYTLSESMIEKYEMHKAHLKMYKEFINTLNAKDRKILKNAYSDYINNEKAKAANAQENFYKTIKKTIKDNNSDTAKKIIGLIDEGNFMPKQRTGENGVIPHQLHQIELDRIIENQAKYYPWLAEENPVEKNRKFAKYKLDELVTFRVPYYVGPLVDKTESNKNEKETKFAWMVRKAKGTITPWNFENLVDRTESANRFIKRMTSKDTYIIGEDVLPASSLLYEKFKVLNELNNIKVNKKKLDVEQKQHVYLDLFTTRKNVTKDNLATSLNCDVESITGLSDNEKFNSSLSSYIDLKAILGNAVDDCNKNKDLEKIIEYSTIFEDGNIYKEKLSEISWLTDEQIEKLSNIHFKGWGRLSKKLLTQITNENGERIIDALWNTSNNFIQIISDESIQAKLAEINGEYADKSNLEDILDEAYTSPQNKKAIRQVMKVVEDIEKAMKCKPTSIAIEFTRRKGKSKLTNTRYKKISETYEKITDELISEYELGKLQSKLDSKANNMRDIYYLYFMQLGRDMYTGEKINIDELHQYYDIDHIFPRSFIKDNSLNNRVLTRKEINNNEKADRTAADLYAVKMGDFWRKLRKQGLITEKKYKNLLTRTDSIDKYTKQSFIKRQLVETSQVVKMAANILQDKYSNTKIIEVRARLNSDLRKEYELIKNREVNDYHHAIDGYLTIFIGQYLYKTYPKLRSYFVYDDFKKLDSNYLKHMDKFNFIWKLEDKKAEDVYDNVNNEFILNVPKMKDYIQKIYNYKYMLISKEVTTESGAFYXZTKYNAKTINLIPIKKDKPTNIYGGYKGKVSSYMMLVKIQKKKEVIYKFVGVPRLWTDELDRLIDTDEKKALLKK

SEQ ID NO: 517 - protein, 1419 aa, Lactobacillus sp.
MAKPQNYTIGLDIGTNSVGWTVTDDQNNILRIKSKKAIGARLFEEGKVAAERRSFRTTRRRLSRRKWRIKLLEELFDEEISKVDPNFFARSHESWISPKDKRERYSAIVFPTPEEDKKFHNEYPTIYHLRDRLMKDDQKHDIREIYVAIHHIMKYRGNFLHDESIETYRSGMSSLGGGDERTILNTKILDDLNDAFADNLATQGISVNSASADQINEIVTSGHLNVDSQKAIAKLLLPTTLSSDDKKQDKKIKKLATDAAKNVASAWLGYKANFAAILNIQEVDKDKKKIYSFALQGADEEDKVETLESVLSQDQIEIVDRIIRIRHAIVLGEIIPVGMTLSEAMIEKYDQHAKDLKNLKTVIRNLKDRKNAVKLQAIYDLYVNNRHADTAKAMKLAGVKKRTELLEPEEFNKSIEKLLDDSPVSAEIKKRIAEKDFLPLQRSNSNGVIPNQLHQIELDEIIKKQSKYYPFLGETNEHASADVARKAPTKLDQLLTFRVPYYVGPLITKEEQEEQDGHSFAWMIRKNPKDHEKITPWNFDEKVDRMASATQFIKRMTTKDTYLLGEDVLPSSSLKYQLFTVLNELNNLRINHKKLTREEKEQVIEDLFKKYKTVKADKFKNYWQKGHAGLDVKIQGMADPEKFNSTMSTYIDLQKIFGDQLDDAQRQNDFEKIIEYSTIFEDRKILGEKLRADFVWLSEDQIKRLCRLRLQGWGRLSLKLLTRLTDADGQNVLERLLNSNDNFMQIVKDPVIKAKIEQKNQKLLRADWSENATESILDEAYTSPQNKKAIRQVMRVVHDIVKACDGNLPAKFAIEFARSQDDDPKRTVARADRLQKIYAQISDEVVSQGVKDQLSGMKSLKDRYYLYFMQGGRDAYTGKPLNIDRLSDYDIDHIMPQSFIKDDSLDNRVLVTRAVNNQKSDNVPVLLYGNHLVADLGITIREMWDRWQKSGMISKRKLANLLTDPATLSEYRAEGFINRQLVETSQVIKLTATILQSEFPDSKIIEVPAKYNSILRKQFDLYKSREVNDYHHAIDAYLSTIVGNYLYQVYPNLRRLFVYGEFKKFSHGEEESSHQAVRRVKSMNFLDDLLRGKHGDDIYCRVTGEVIFSRKDIISKLKQAYSFKQMLVTQEVFTKKSALFDQTVYPSPARDSKTRSGLIPRKQGMDTEIYGGYSGNKDAYFVLAQVVKSKGHTLQVVGVPIRALRALANCSNYSEQLLKIVKAQVLFNKKTGKAKKGISDVRILLDKIPYRQPVLDGSAFYMLGSSTYKYNLKQISLSQQSMKYILDYIDDPNFNKHEMTKIDQQNEKECLLSVYDEILDKMDKYLSLYDINGFRKKLHVGRDKFIKLEVEKQAEAIKNVLRGFHANSDMTKLSDLGLSTSLGFMQASDGIKLSDNAVFIYQSPTGLFERRVKVSDLLK

SEQ ID NO: 518 - protein, 1289 aa, Lactobacillus versmoldensis
MRRRYRRRRNRLNWLDELFADELAKIDPSFLLRMKNSWVSKKESTRKRDPYNLFIDEKYNDVDYFNQYPTIFHLRKELITEDKKVDIRLIYLAIHNIIKYRGNFTLENQNFDISQLSSNFSQQISDFFALFSDFGVIMPEDFDPDKISDILLNPNLSPSGKVSEAIATISPKTNVKAKIKIILLLLVGNNGDLKKLFDLETTEKIAVKLSSRHIDSELPIILSELNEQQENIITIANSIFGSIILKDFLGDETSISAAKVISFEDHKQDLQKLKTMWRETSNKEAVKAGKKAYEDYIGHEDSETFYKKIKKFLEKAQPVDLANKALAEIELENYLPKQRNRNNTVIPYQLNENELIAILDHQEKYYPFLKENRDKILSLLTFRIPYYVGPLQDSNNNRFSWMTRKASGAIRPWNFSEKVNVEQSSNDFIKRMRSTDTYLIGEPVLPKKSLIYQCYEVLSELNNTRVKDGSSNPKRLDVTIKQRIYNEIFKNQKSVSVKVLQNWLIKESYFKSPEISGLADKKKYLSSLSTYIDFKKIFGQRFVDDPVNSPQLEELAEWLTLFEDKKILLIKLQNSKYSYDQATINKLSTMRYQGTGKLSKKLLVDLKTTKKSIGKSGAESLSILDLMWSTKDNFMQIIHDADYTFEQQIKEFNYDTEDELTPLEKVANLHGSPALKRGLNQSIKVVADIVKFMGHDPEKIFIEFTRSDDFSKLTISRYRRIKKQYLEIAKAIKKIPAEFKDIKEYQTQLEENKGKLASERLMLYFLQCGHSLYSNKPIDLNMINSSKYHVDHILPQSYIKDDSLENKALVLASENENKIDNMLISHDIIATNLPRWQALKDQNLMGSKKFADLTRTTVTENQKKGFIQRQLVQTSQIVKNITLILNDLYKNTSCIETRATLSSEFRKAFSNFDETTYHYQFPEFVKNRDVNDFHHAQDAFLACVIGEYQLKKYPKDNLRLVYDQYSKFLDSLKKDTRKKNGRMPRYTQNGFIIGSMFNGKTYVDDNGEIIWDQKIKESIRKTFNYHQFNVVRQTIEQHGKLFNDTIQPHSDRYKLIPLKTNRDPAIYGGYNNDNNAYSVVLDVDGKKKINGIPIRIANQLKSDELDLSSWLENNIKHKKPMTILIDKVPKYQRIINEETGDLLITSANEVINNVQLFLPSMYTALISLLDSTKTEMYSKLLSNYEANILIDIYDYLLTKLKNNYPLYRKEWAKLAEHRDDFIESDLVTQASTLQQLIKFMHADPSNVNLKFGNFKGNRFGRKNGNIKLSKTDFIYESPTGLFKSIKHID

SEQ ID NO: 519 - protein, 1372 aa, Legionella pneumophila
MESSQILSPIGIDLGGKFTGVCLSHLEAFAELPNHANTKYSVILIDHNNFQLSQAQRRATRHRVRNKKRNQFVKRVALQLFQHILSRDLNAKEETALCHYLNNRGYTYVDTDLDEYIKDETTINLLKELLPSESEHNFIDWFLQKMQSSEFRKILVSKVEEKKDDKELKNAVKNIKNFITGFEKNSVEGHRHRKVYFENIKSDITKDNQLDSIKKKIPSVCLSNLLGHLSNLQWKNLHRYLAKNPKQFDEQTFGNEFLRMLKNFRHLKGSQESLAVRNLIQQLEQSQDYISILEKTPPEITIPPYEARTNTGMEKDQSLLLNPEKLNNLYPNWRNLIPGIIDAHPFLEKDLEHTKLRDRKRIISPSKQDEKRDSYILQRYLDLNKKIDKFKIKKQLSFLGQGKQLPANLIETQKEMETHFNSSLVSVLIQIASAYNKEREDAAQGIWFDNAFSLCELSNINPPRKQKILPLLVGAILSEDFINNKDKWAKFKNFWNTHKIGRTSLKSKCKEIEEARKNSGNAFKIDYEEALNHPEHSNNKALIKIIQTIPDIIQAIQSHLGHNDSQALIYHNPFSLSQLYTILETKRDGFHKNCVAVTCENYWRSQKTEIDPEISYASRLPADSVRPFDGVLARMMQRLAYEIAMAKWEQIKHIPDNSSLLIPIYLEQNRFEFEESFKKIKGGSSDKTLEQAIEKQNIQWEEKFQRIINASMNICPYKGASIGGQGEIDHIYPRSLSKKHFGVIFNSEANLIYCSSQGNREKKEEHYLLEHLSPLYLKHQFGTDNVSDIKNFISQNVANIKKYISFHLLTPEQQKAARHALFLDYDDEAFKTITKFLMSQQKARVNGTQKFLGKQIMEFLSTLADSKQLQLEFSIKQITAEEVHDHRELLSKQEPKLVKSRQQSFPSHAIDATLTMSIGLKEFPQFSQELDNSWFINHLMPDEVHLNPVRSKEKYNKPNISSTPLFKDSLYAERFIPVWVKGETFAIGFSEKDLFEIKPSNKEKLFTLLKTYSTKNPGESLQELQAKSKAKWLYFPINKTLALEFLHHYFHKEIVTPDDTTVCHFINSLRYYTKKESITVKILKEPMPVLSVKFESSKKNVLGSFKHTIALPATKDWERLFNHPNFLALKANPAPNPKEFNEFIRKYFLSDNNPNSDIPNNGHNIKPQKHKAVRKVFSLPVIPGNAGTMMRIRRKDNKGQPLYQLQTIDDTPSMGIQINEDRLVKQEVLMDAYKTRNLSTIDGINNSEGQAYATFDNWLTLPVSTFKPEIIKLEMKPHSKTRRYIRITQSLADFIKTIDEALMIKPSDSIDDPLNMPNEIVCKNKLFGNELKPRDGKMKIVSTGKIVTYEFESDSTPQWIQTLYVTQLKKQP

SEQ ID NO: 520 - protein, 907 aa, Leptospira inadai
MAKSIEEIRSIQNEFVVEYSILLKKIKKGEIDKKNDVYKVYQNTIKSSERLEQVLKERLGFQNVSKSYFNNPYSIAQLYNLISVDRSGFSKVCRSCQEENHWRSTLIDTDRGPQAQASKQVSDTGRPFDGQLAMLLDRIAFEIVKLKRIEIERLLSNKNSSKIEVVEIPLLIEENSFNFRYELAELKKLSKKKKDQLKKSVEEFDTKLNSKQERIKAASRELCPYTGKKISKGEIDHILPRSWTQKQFGTALNAEANLIYASREGNQSKGNREYGLNDLDEKYLNIIFGTKEVDSIQRNISDTIDRLDIERGTTRIVFDRLAPNERDCLRHALFIKSLRPKVFELLSGQLKARVNGTQLYLAKRIRSLLLKNQDFITKSLIIKVPSFSFYEPRTVDLPYMRKELAEKFPNLGKQNPQPTGSHIIDAAMVMAYAVETDSGNLSFGSKDKSEGFDSESLSRFLPSNIQFLSIKSKDKTDSKYPYKKPLFKDGVFGERFLPILIAEKGLRVGYTLENSLEVNSENPEEFFNVLKPYLLFKRKPIESNYQTLVAFAQKDKRGYIVLPVNKPKALESISQRKSDPHTSILKNILYTVSRESIPSLIFDKNTLIPEIKSNKVNWGDKLEKKFRIKIEIKLYGKKIADGFIRYPGKTEWEKLLLTEPLKGLVKNKTLTPKWFDSLENLAGLDDHFKDTSNPEAKHKRKSNHYALPVPKGPSGGFRIRRNSFDGYKVYQLYSVDGNSFHAFKIENGWTGKTLLLDIYQNSGNLHSLDYDYENTDISQTALFSKFYKIEFSKEETQKINSKGIKSLYVAPGSSSRQYIRVIFDKQTFSKFIKFQSKFWEFDLITPLPKDKAKDLIESILKIFPEDLRPKKPRNDIHIQNISHDSVQVEYIADGKTQGFGQYFINQN

SEQ ID NO: 521 - protein, 418 aa, Leptospira inadai
MILKSPIAIDLGAKNTGIVYTTYQPNALPTEIHGATIISDNLKLSQVDRRAKRHQRRNYTRMKLARRLVYLIIRYHYRIPEQDLTPEVKTSLQSLLTRRGYTFQSIETEGNELGQAPWGEIEDYFPNVQDYEKSLPIQTVLYHFFSSENLELNKLVPSKEPETKEDKNILKYIREQKEAFESEQNNGARHRLKYFEEIKEDFPRKIKLMECLQKNKIEEKKFLNLIQNISNLQIKPLRAYFNDKDMKEKEIWEPRRLHTYIARWIRSWHIDPKNSSKRLIRQKLLSQLENGKLKIIRDTSIYSPSKDIISFLEEIDPKDTIPPYEDQNNRHPPRCQNLWLDGKILDRYFPGWEQSLWKLIRNEKNNPFEQLITKDFRTDDTISEGKSLSEQIQIYERSHSNIKLDVRAVILQRFLDRS

SEQ ID NO: 522 - protein, 125 aa, Leptospira inadai
MSAYDRSANLDPWSLRLQGKAKKEIKTTESLSKTDLQKASDAYEKIKEILSESDTDQFIKLANRYYLEVADIKKGMWLPTAPERKHKEIPKSIAHEENQDISLFHKCNTKTGSKKRISQVSLEMF

SEQ ID NO: 523 - protein, 1355 aa, Leuconostoc gelidum
MTYSIGLDIGTGSVGWAVIGDDYRLKRAKGKNLIGVRLFDSATTAAERRGYRTTRRRLSRRHWRLRLLNDIFASDLAEQDENFLPRLKYSWVNPDDEQNPQLNSDVANGALFGSSETDKAFHKNYPTIYHLRHELMTDTAKHDLREVYLAIHHIVKYRGNFLNTADKINAENSFNVDLFIAALDEYNEFLETPITSIKDAQLFSDKLTDINARNKSVRVENAMSETYDDKSKIFKAILTALVGNTANFQTIFDLSDLEKDEAKNFKFKLDLEDVETKLDVVRAKLSDEQNAFLEAVLIAYDGITLKMILGDYKSISQSMIESYKSHQRDWKYIKNNVRLNEQKIEPDKNSVKFFKLDPKKLIYPSNLAYLQVISSNEDEHRKGLDYFKTAIQDADILQRIENDTFLPRQRTKRNGVLPYQLHLAELEQIIKKQSKYYPFLANIYTQDNKTENKLIGLLKFRVPYYVGPLVEAEKVTGDGKNHWLIKKELQENTPITPFNFDDVVDKDKSGEQFIKRITGTDSYLIGEPTLPENSLLYQKYNVLQELNNVRNERHQRLPIKVKQDIFEHVFKIDKNVNAKKVMAYLKLNGYGDFQIAGLSDTRTGKFNSNLSSYNYFVDLLGREKTEKIREDRLEEIIEIQTVFEDKILVAKRLSNLDFLTPQEKSKLSAKHYTGWGRLSQKLLTTQFIKTALSEAGDIIPQSHSIIDLLYYTDKNLMEILNDKTFNVRNWLTEQNKGTESGNSLYDQIDALAGPKDIKRGITQVFSIIDDIKKAMGSNPETVYLEFARETQTSRLTNSRLNRVQEIYNSPELKTEFAYLAKKLEAETKESIHDDRLYLYYLQEGRDMYTGKEIPFDQISSNYDIDHIIPQAFTKDDSLDNRVLVNRATNARKSNSPTFTNDIIDNRKSWWQSLVKRGLMSKEKFERLTDKRKTFSENQTNHFIARQLVETRQIIKNVADLIKNNYDGTQAVAIRASLTGEMRRYLDWPKNRDMNDYHHAHDALMMATVGKYVDRRGFFDNGSVSDGAGNAYNLYTKDWLVAARVGTRNDSQRVNPYGFIVGSMNSKAVRQQVNKETGEIVWGNENLDYLRHVLSYKKILVTRRLSGSSGRLYAETLFSPNPKAKLIAQKANRSVALYGGFTKAESAYTALVEFNKKGDRSYKLIKVPMAIANRVNDKQITVTAYIASLNLRDFSRVVLEHLPLGTLIRESDGSEFYAASSEYKHNAKELWAPKEILRSSKKLDKATADNLIDIFDFLTNDKTISNFKFYEKDLLHLKNVRDKFVEASDEIKIKVLSDVIYELHNDAGWRDPFKHIQEKPAWTMLQVKGGIKLSEKAAIVYQSPTGLFETITIVGE

SEQ ID NO: 524 - protein, 883 aa, Leuconostoc pseudomesenteroides
MIGVRLFEGADTAAERRGYRTTRRRLSRRRWRLRLLNDIFASELSKIDENFLPRLKYSWVNKNDTDNVHFGVGVFDNSEQEKAFYQDYPTIYHLRQKLMTDNRQHDLREVYLAIHHIVKYRGHFLNSGEISANSSFDAQKFLELLREFDNTFYPDAVKFLNLDQLDLPDKISSEISDSKISKSERVDRVLQHVQLANSGAKKILKAILNAVVGNSVDSVAMFSLSDLDKEEKKKINHPVTDSKPFKYSDKEVEAKLDELSNLLQDEQKIEFLSLLKLSFDGLTLKMLLGNAKSVSEAMVERYKVHKDDLKFIKENILNSFSKDKKKEFDKYYEAHLAEKDVDNVDKYFKKIIDDSIISKDKKIELLQKIDDHDFLPSQRSKINGAIPHQLHRNELDKIISQQSKYYPFLADSYTQNGKTETKLAGLVNFRVPYYVGPLVSKENADRNNPDGGQNHWVEFKENTSLSNLTPWNFNEIVDKDKSAAKFIERLTGMDTYLIGEPTLPQNSLLYQKYNVLQELNNIRVDNHKLDVKIKQDVFEHLFKTQNSVSAKDVKNYLIANGYAAPSIQITGLSDTNEKTFNSKLSSYNYLVDKLGRTFVESVKSDVLEKIIELQTVFEDKTVLLRQLSMISELTLAQANQLAEKHWTGWGRLSRKLLSSKVVDVNKITNSTFYPATSRQTIIDTLYHTQLNLMEIINNAEDLYGVRQWISEQNKSDSSDTNDVYDQIQELAGDKKIKRGITQSFRILDDIVKAMGGEPERVYLEFARENQQSGVSFSRKNLLSKLYENDSLKQTFKELKSQLESETKENLQNDRLYLYYLQQGRDMYSNDELNIDQLSSYDIDHIIPQAYTKDNSFDNRVLVSSKANRLKRMLLWYPVKLSKK

SEQ ID NO: 525 - protein, 468 aa, Leuconostoc pseudomesenteroides
MKDQGFISKRKFENLTRRGDFSEQQKERFIARALVETRQIIVNVSSLIDSHFNHTKAVAVKSNMTTDMRHYTKVPKNRDINDYHHAHDALFVATVGQYIENKGFMKAGKLSDSVGNEYNRYTKKWIETARKNTNYGRVNPFGFVVGSMQTATRGKLDYETGELKVVKNNYWSKDDLDYLLKVVSYKKILVTTKLQDNKGAMYDANLISAKGSGKKKAQLQISKSKNIDLYGGFNKLQNEYSVLILNHDEYRWLSIPMYARNSSEQYLHDKYPDAKVILNHILVGQPILLSNSSDPQKSKFASLRIATGGDYHNNFEFVPSVDVKKILDNIYLNHSVTDDEYKKVFESLLATLHDKFVFGIHQVMYNKIFDNKYLFDKMPDEAKRNVINSLLKFMNISKNQLGAVGKIGGKVNGVLYGFKTETEKGTSAGQLISNGKMQPHDIFIFQSPTGIFERRVTVAELANVIKDE

SEQ ID NO: 526 - protein, 1103 aa, Listeria innocua
LKLYPGEKSTGMFAQFISLIVGSKGNFQKPFDLIEKSDIECAKDSYEEDLESLLALIGDEYAELFVAAKNAYSAVVLSSIITVAETETNAKLSASMIERFDTHEEDLGELKAFIKLHLPKHYEEIFSNTEKHGYAGYIDGKTKQADFYKYMKTTLENIEGADYFIAKIEKENFLRKQRTFDNGAIPHQLHLEELEAILHQQAKYYPFLKENYDKIKSLVTFRIPYFVGPLANGQSEFAWLTRKADGEIRPWNIEEKVDFGKSAVDFIEKMTNKDTYLPKENVLPKHSLCYQKYLVYNELTKVRYINDQGKTSYFSGQEKEQIFNDLFKQKRKVKKKDLELFLRNMSHVESPTIEGLEDSFNSSYSTYHDLLKVGIKQEILDNPVNTEMLENIVKILTVFEDKRMIKEQLQQFSDVLDGVVLKKLERRHYTGWGRLSAKLLMGIRDKQSHLTILDYLMNDDGLNRNLMQLINDSNLSFKSIIEKEQVTTADKDIQSIVADLAGSPAIKKGILQSLKIVDELVSVMGYPPQTIVVEMARENQTTGKGKNNSRPRYKSLEKAIKEFGSQILKEHPTDNQELKNNRLYLYYLQNGKDMYTGQDLDIHNLSNYDIDHIVPQSFITDNSIDNLVLTSSAGNREKGNDVPPLEIVQKRKVFWEKLYQGNLMSKRKFDYLTKAERGGLTEADKARFIHRQLVETRQITKNVANILHQRFNYGKDDHGNTMKQVRIVTLKSALVSQFRKQFQLYKVRGVNDYHHAHDAYLNGVVANTLLKVYPQLEPEFVYGDYHQFDWFKANKATAKKQFYTNIMLFFAQKDRIIDENGEILWDKKYLDTVKKVMSYRQMNIVKKTEIQKGEFSKATIKPKGNSSKLIPRKTNWDPMKYGGLDSPNMAYAVVIEYAKGKNKLVFEKKIIRVTIMERKAFEKDEKAFLEEQGYRQPKVLAKLPKYTLYECEEGRRRMLASANEAQKGNQQVLPNHLVTLLHHAANCEVSDGKSLDYIESNREMFAELLAHVSEFAKRYTLAEANLNKINQLFEQNKEGDIKAIAQSFVDLMAFNAMGAPASFKFFETTIERKRYNNLKELLNSTIIYQSITGLYESRKRLDD

SEQ ID NO: 527 - protein, 1337 aa, Listeria innocua
MKNMKKPYTIGLDIGTNSVGWAVLTDQYDLVKRKMKIAGDSEKKQIKKNFWGVRLFDEGQTAADRRMARTARRRIERRRNRISYLQGIFAEEMSKTDANFFCRLSDSFYVDNEKRNSRHPFFATIEEEVEYHKNYPTIYHLREELVNSSEKADLRLVYLALAHIIKYRGNFLIEGALDTQNTSVDGIYKQFIQTYNQVFASGIEDGSLKKLEDNKDVAKILVEKVTRKEKLERILKLYPGEKSAGMFAQFISLIVGSKGNFQKPFDLIEKSDIECAKDSYEEDLESLLALIGDEYAELFVAAKNAYSAVVLSSIITVAETETNAKLSASMIERFDTHEEDLGELKAFIKLHLPKHYEEIFSNTEKHGYAGYIDGKTKQADFYKYMKMTLENIEGADYFIAKIEKENFLRKQRTFDNGAIPHQLHLEELEAILHQQAKYYPFLKENYDKIKSLVTFRIPYFVGPLANGQSEFAWLTRKADGEIRPWNIEEKVDFGKSAVDFIEKMTNKDTYLPKENVLPKHSLCYQKYLVYNELTKVRYINDQGKTSYFSGQEKEQIFNDLFKQKRKVKKKDLELFLRNMSHVESPTIEGLEDSFNSSYSTYHDLLKVGIKQEILDNPVNTEMLENIVKILTVFEDKRMIKEQLQQFSDVLDGVVLKKLERRHYTGWGRLSAKLLMGIRDKQSHLTILDYLMNDDGLNRNLMQLINDSNLSFKSIIEKEQVTTADKDIQSIVADLAGSPAIKKGILQSLKIVDELVSVMGYPPQTIVVEMARENQTTGKGKNNSRPRYKSLEKAIKEFGSQILKEHPTDNQELRNNRLYLYYLQNGKDMYTGQDLDIHNLSNYDIDHIVPQSFITDNSIDNLVLTSSAGNREKGDDVPPLEIVRKRKVFWEKLYQGNLMSKRKFDYLTKAERGGLTEADKARFIHRQLVETRQITKNVANILHQRFNYEKDDHGNTMKQVRIVTLKSALVSQFRKQFQLYKVRDVNDYHHAHDAYLNGVVANTLLKVYPQLEPEFVYGDYHQFDWFKANKATAKKQFYTNIMLFFAQKDRIIDENGEILWDKKYLDTVKKVMSYRQMNIVKKTEIQKGEFSKATIKPKGNSSKLISRKTNWDPMKYGGLDSPNMAYAVVIEYAKGKNKLVFEKKIIRVTIMERKAFEKDEKAFLEEQGYRQPKVLAKLPKYTLYECEEGRRRMLASANEAQKGNQQVLPNHLVTLLHHVANCEVSDGKSLDYIESNREMFAELLAHVSEFAKRYTLAEANLNKINQLFEQNKEGDIKAIAQSFVDLMAFNAMGAPASFKFFETTIERKRYNNLKELLNSTIIYQSITGLYESRKRLDD

SEQ ID NO: 528 - protein, 953 aa, Listeria ivanovii
MKKMLANIDGADYFIDQIEEENFLRKQRTFDNGTIPHQLHLEELEAILHQQAKYYPFLRKDYEKIRSLVTFRIPYFIGPLANGQSDFAWLTRKADGEIRPWNIEEKVDFGKSAIDFIEKMTNKDTYLPKENVLPKHSLCYQKYMVYNELTKIRYIDDQGKTHHFSGQEKQQIFNGLFKQQRKVKKKDLERFLYTINHIESPTIEGVEDAFNSSFATYHDLQKGGVTQEILDNPLNADMLEEIVKILTVFEDKRMIKEQLQSFSDVLDGTILKKLERRHYTGWGRLSAKLLTGIRDKHSHLTILDYLMNDDGLNRNLMQLINDSNLSFKSIIEKEQVSTADKGIQSIVAELAGSPAIKKGILQSLKIVDELVGIMGYPPQTIVVEMARENQTTGKGKNNSKPRFISLEKAIKEFGSQILKEHPTDNQCLKNDRLYLYYLQNGKDMYTGKELDIHNLSNYDIDHIIPQSFITDNSIDNRVLVSSTANREKGDNVPLLEVVRKRKAFWEKLYQAKLMSKRKFDYLTKAERGGLTEADKANFIQRQLVETRQITKNVANILYQRFNCKQDENGNEVEQVRIVTLKSTLVSQFRKQFQLYKVREVNDYHHAHDAYLNGVVANTLLKVYPQLEPEFVYGDYHQFDWFKANKATAKKQFYTNIMRFFAKENQIIDKNGEILWDNRYLDTIKKVLSYRQMNIVKKTEIQKGEFSNATVNPKGNSSKLISRKADWNPIKYGGFDGSNMAYSIVIEYEKRKKKTVIKKELIQINIMERVAFEKDQKAFLEEKGYYSPKVLTKIPKYTLYECENGRRRMLGSANEAQKGNQMVLPNHLMTLLYHAKNCEANDGESLAYIEMHREMFAELLAYISEFAKRYTLANDRLEKINMFFEQNKKGDIKVIAKSFDKLKVFNAFGAPRDFEFFETTIKRKRYYNIKELLNATIIYQSITGLYEARKRLED

SEQ ID NO: 529 - protein, 232 aa, Listeria ivanovii
MMSKLILGLDIGISSVGWGVLDESTNEVVDAGVRLFEEATRNGNEDRRGFRSARRLKRRRQHRLERAKGLIENNGFSCTDINKFNPYQARYNAIFGEVTKDELAAALFHLVKRRGTTIDAPEEEVKDVENELSTKMQLEKNAKKLATKYDYICEIQLEKLKENKVVRDHENRFRTEDYVKEARAILENQQEYYPEVTNEFIESYMALIETRRMYYDGPGSEKSPTPYGQYFI

SEQ ID NO: 530 - protein, 300 aa, Listeria monocytogenes
DDGLNRNLMQLINDSNLSFKSIIEKEQVSTTDKDLQSIVADLAGSPAIKKGILQSLKIVDELVSIMGYPPQTIVVEMARENQTTVKGKNNSRPRYKSLEKAIKEFGSQILKEHPTDNQELRNNRLYLYYLQNGKDMYTGQELDIHNLSNYDIDHIVPQSFITDNSIDNLVLTSSAGNREKGDDVPPLEIVRKRKVFWEKLFQGNLMSKRKFDYLTKAERGGLTEADKATFIHRQLVETRQITKNVANILHQRFNNETDNHGNNMEQVRIVMLKSALVSQFRKQFQLYKVREVNDYHHAHD

SEQ ID NO: 531 - protein, 782 aa, Listeria monocytogenes
  VARIANT 722: note = Xaa can be any naturally occurring amino acid
IFNDLFKQKRKVKKKDLELFLRNINQIESPTIEGLEDSFNASYATYHDLLKVGMKQEILDNPLNTEMLEDIVKILTVFEDKRMIKEQLQQFSDVLDGVVLKKLERRHYTGWGRLSAKLLVGIRDKQSHLTILEYLMNDDGLNRNLMQLINDSNLSFKSIIEKEQVSTTDKDLQSIVADLAGSPAIKKGILQSLKIVDELVSIMGYPPQTIVVEMARENQTTVKGKNNSRPRYKSLEKAIKEFGSQILKEHPTDNQELKNNRLYLYYLQNGKDIYTGQELDIHNLSNYDIDHIVPQSFITDNSIDNLVLTSSAGNREKGDDVPPLEIVRKRKVFWEKLYQGNLMSKRKFDYLTKAERGGLTEADKARFIHRQLVETRQITKNVANILHQRFNNETDNHGNTMEQVRIVTLKSALVSQFRKQFQLYKVREVNDYHHAHDAYLNGVVANTLLKVYPQLEPEFVYGEYHQFDWFKANKATAKKQFYTNIMLFFAQKERIIDENGEILWDKKYLETIKKVLDYRQMNIVKKTEIQKGEFSKATIKPKGNSSKLIPRKENWDPMKYGGLDSPNMAYAVIIEHAKGKKKIVIEKKLIQINIMERKMFEKDEEAFLEEKGYRHPKVLTKLPKYTLYECEKGRRRMLASANEAQKGNQLVLSNHLVSLLYHAKNCEASDGKSLKYTEAHRETFSELLAQVSEFATRYTLADANLSKINNLFEQNKEGDIKXIAQSFVDLMVFNAMGAPASFKFFEATIDRKRYTNLKELLSSTIIYQSITGLYESRKRLDD

SEQ ID NO: 532 - protein, 1334 aa, Listeria monocytogenes; identical to SEQ ID NO: 114

SEQ ID NO: 533 - protein, 1334 aa, Listeria monocytogenes
MKNPYTIGLDIGTNSVGWAVLTDQYDLVKRKMKVAGNSDKKQIKKNFWGVRLFDDGQTAVDRRMNRTARRRIERRRNRISYLQEIFAVEMANIDANFFCRLNDSFYVDSEKRNSRHPFFATIEEEVAYHKNYRTIYHLREELVNSSEKADLRLVYLALAHIIKYRGNFLIEGALDTKNTSVDEVYKQFIQTYNQVFMSNIEEGALAKVEENTEVASILAGKFTRREKFERILRLYPGEKSTGMFAQFISLIVGNKGNFQKVFNLVEKTDIECAKDSYEEDLEALLAIIGDEYAELFVAAKNTYNAVVLSSIITVTATETNAKLSASMIERFDAHEKELGELKAFIKLHLPKQYQEIFNNAEIDGYAGYIDGKTKQVDFYKYLKTTLENVEGADYFITKIEEENFLRKQRTFDNGVIPHQLHLEELEAILHQQAKYYPFLREGYDKIKSLVTFRIPYFVGPLANGQSEFAWLTRKDDGEIRPWNIEEKVDFGKSAVDFIEKMTNKDTYLPKENVLPKHSLCYQKYMVYNELTKIRYIDDQGKTNYFSGREKQQIFNDLFKQKRKVKKKDLELFLRNINHIESPTIEGLEDSFNASYATYHDLLKVGLKQEILDNPLNTEILEDIVKILTVFEDKRMIKEQLEQFSDVLDGVVLKKLERRHYTGWGRLSAKLLVGIRDKQSHLTILDYLMNDDGLNRNLMQLINDSNLSFKSIIEKEQVSTTDKDLQSIVADLAGSPAIKKGILQSLKIVDELVSIMGYPPQTIVVEMARENQTTGKGKNNSKPRYKSLEKAIKDFGSQILKEHPTDNQELKNNRLYLYYLQNGKDIYTGQELDIHNLSNYDIDHIVPQSFITDNSIDNLVLTSSAGNREKGGDVPPLEIVRKRKVFWEKLYQGNLMSKRKFDYLTKAERGGLTEADKARFIHRQLVETRQITKNVANILHQRFNKETDNHGNTMEQVRIVTLKSALVSQFRKQFQLYKVREVNDYHHAHDAYLNGVVANTLLKVYPQLEPEFVYGEYHQFDWFKANKATAKKQFYTNIMLFFAQKERIIDENGEILWDKKYLETIKKVLDYRQINIVKKTEIQKGEFSKATIKPKGNSSKLIPRKENWDPMKYGGLDSPNMAYAVIIEHAKGKKKIVIEKKLIQINIMERKMFEKDEEAFLEEKGYHQPKVLTKLPKYTLYECEKGRRRMLSSANEAQKGNQLVLSNHLVSLLYHAKNCEASDGKSLKYIEAHRETFSELLAQVSEFATKYTLADANLSKINNLFEQNKEGDIKAIAQSFVDLMAFNAMGAPASFKFFEATIDRKRYTNLKELLSSTIIYQSITGLYESRKRLDD

SEQ ID NO: 534 - protein, 1334 aa, Listeria monocytogenes
MKNPYTIGLDIGTNSVGWAVLTDQYDLVKRKMKVAGNSDKKQIKKNFWGVRLFDDGQTAVDRRMNRTARRRIERRRNRISYLQEIFAVEMANIDANFFCRLNDSFYVDSEKRNSRHPFFATIEEEVAYHKNYRTIYHLREELVNSSEKADLRLVYLALAHIIKYRGNFLIEGALDTKNTSVDEVYKQFIQTYNQVFMSNIEEGALAKVEENTEVASILAGKFTRREKFERILRLYPGEKSTGMFAQFISLIVGNKGNFQKVFNLVEKTDIECAKDSYEEDLEALLAIIGDEYAELFVAAKNTYNAVVLSSIITVTATETNAKLSASMIERFDAHEKELGELKAFIKLHLPKQYQEIFNNAEIDGYAGYIDGKTKQVDFYKYLKTTLENVEGADYFITKIEEENFLRKQRTFDNGVIPHQLHLEELEAILHQQAKYYPFLREGYDKIKSLVTFRIPYFVGPLANGQSEFAWLTRKDDGEIRPWNIEEKVDFGKSAVDFIEKMTNKDTYLPKENVLPKHSLCYQKYMVYNELTKIRYIDDQGKTNYFSGREKQQIFNDLFKQKRKVKKKDLELFLRNINHIESPTIEGLEDSFNASYATYHDLLKVGLKQEILDNPLNTEILEDIVKILTVFEDKRMIKEQLEQFSDVLDGVVLKKLERRHYTGWGRLSAKLLVGIRDKQSHLTILDYLMNDDGLNRNLMQLINDSNLSFKSIIEKEQVSTTDKDLQSIVADLAGSPAIKKGILQSLKIVDELVSIMGYPPQTIVVEMARENQTTGKGKNNSKPRYKSLEKAIKDFGSQILKEHPTDNQELKNNRLYLYYLQNGKDIYTGQELDIHNLSNYDIDHIVPQSFITDNSIDNLVLTSSAGNREKGGDVPPLEIVRKRKVFWEKLYQGNLMSKRKFDYLTKAERGGLTEADKARFIHRQLVETRQITKNVANILHQRFNKETDNHGNTMEQVRIVTLKSALVSQFRKQFQLYKVREVNDYHHAHDAYLNGVVANTLLKVYPQLEPEFVYGEYHQFDWFKANKATAKKQFYTNIMLFFAQKERIIDENGEILWDKKYLETIKKVLDYRQINIVKKTEIQKGEFSKATIKPKGNSSKLIPRKENWDPVKYGGLDSPNMAYAVIIEHAKGKKKIVIEKKLIQINIMERKMFEKDEEAFLEEKGYHQPKVLTKLPKYTLYECEKGRRRMLSSANEAQKGNQLVLSNHLVSLLYHAKNCEASDGKSLKYIEAHRETFSELLAQVSEFATKYTLADANLSKINNLFEQNKEGDIKAIAQSFVDLMAFNAMGAPASFKFFEATIDRKRYTNLKELLSSTIIYQSITGLYESRKRLDD

SEQ ID NO: 535 - protein, 1099 aa, Listeria monocytogenes
MKNPYTIGLDIGTNSVGWAVLTDQYDLVKRKMKVAGNSDKKQIKKNFWGVRLFDDGQTAVDRRMNRTARRRIERRRNRISYLQEIFAVEMANIDANFFCRLNDSFYVDSEKRNSRHPFFATIEEEVAYHKNYRTIYHLREELVNSSEKADLRLVYLALAHIIKYRGNFLIEGALDTKNTSVDEVYKQFIQTYNQVFMSNIEEGALAKVEENTEVASILAGKFTRREKFERILRLYPGEKSTGMFAQFISLIVGNKGNFQKVFNLVEKTDIECAKDSYEEDLEALLAIIGDEYAELFVAAKNTYNAVVLSSIITVTATETNAKLSASMIERFDAHEKELGELKAFIKLHLPKQYQEIFNNAEIDGYAGYIDGKTKQVDFYKYLKTTLENVEGADYFITKIEEENFLRKQRTFDNGVIPHQLHLEELEAILHQQAKYYPFLREGYDKIKSLVTFRIPYFVGPLANGQSEFAWLTRKDDGEIRPWNIEEKVDFGKSAVDFIEKMTNKDTYLPKENVLPKHSLCYQKYMVYNELTKIRYIDDQGKTNYFSGREKQQIFNDLFKQKRKVKKKDLELFLRNINHIESPTIEGLEDSFNASYATYHDLLKVGLKQEILDNPLNTEILEDIVKILTVFEDKRMIKEQLEQFSDVLDGVVLKKLERRHYTGWGRLSAKLLVGIRDKQSHLTILDYLMNDDGLNRNLMQLINDSNLSFKSIIEKEQVSTTDKDLQSIVADLAGSPAIKKGILQSLKIVDELVSIMGYPPQTIVVEMARENQTTGKGKNNSKPRYKSLEKAIKDFGSQILKEHPTDNQELKNNRLYLYYLQNGKDIYTGQELDIHNLSNYDIDHIVPQSFITDNSIDNLVLTSSAGNREKGGDVPPLEIVRKRKVFWEKLYQGNLMSKRKFDYLTKAERGGLTEADKARFIHRQLVETRQITKNVANILHQRFNKETDNHGNTMEQVRIVTLKSALVSQFRKQFQLYKVREVNDYHHAHDAYLNGVVANTLLKVYPQLEPEFVYGEYHQFDWFKANKATAKKQFYTNIMLFFAQKERIIDENGEILWDKKYLETIKKVLDYRQINIVKKTEIQKGEFSKATIKPKGIPAN

SEQ ID NO: 536 - protein, 1334 aa, Listeria monocytogenes
MKNPYTIGLDIGTNSVGWAVLTDQYDLVKRKMKVAGNSDKKQIKKNFWGVRLFDEGETAADRRMNRTARRRIERRRNRISYLQEIFALEMANIDANFFCRLNDSFYVDSEKRNSRHPFFATIEEEVAYHKNYRTIYHLREELVNSSEKADLRLVYLALAHIIKYRGNFLIEGALDTKNTSVDGVYKQFIQTYNQVFISNIEEGTLAKMEENTTVADILAGKFTRKEKLERILQLYPGEKSTGMFAQFISLIVGSKGNFQKVFDLVEKTDIECAKDSYEEDLEALLAIIGDEYAELFVAAKNTYNAVVLSSIITVTDTETNAKLSASMIERFDAHEKDLSELKAFIKLHLPKQYEEIFSNVAIDGYAGYIDGKTKQVDFYKYLKTLLENIEGADYFIAKIEEENFLRKQRTFDNGAIPHQLHLEELEAILHQQAKYYPFLKEAYDKIKSLVTFRIPYFVGPLANGQSDFAWLTRKADGEIRPWNIEEKVDFGKSAVDFIEKMTNKDTYLPKENVLPKHSLYYQKYMVYNELTKVRYIDDQGKTNYFSGQEKQQIFNDYFKQKRKVSKKDLEQFLRNMSHIESPTIEGLEDSFNSSYATYHDLLKVGIKQEVLENPLNTEMLEDIVKILTVFEDKRMIKEQLQQFSDVLDGAVLKKLERRHYTGWGRLSAKLLVGIRDKQSHLTILDYLMNDDGLNRNLMQLINDSNLSFKSIIEKEQVSTTDKDLQSIVADLAGSPAIKKGILQSLKIVDELVSIMGYPPQTIVVEMARENQTTVKGKNNSRPRYKSLEKAIKEFGSQILKEHPTDNQELRNNRLYLYYLQNGKDMYTGQELDIHNLSNYDIDHIVPQSFITDNSIDNLVLTSSAGNREKGDDVPPLEIVRKRKVFWEKLFQGNLMSKRKFDYLTKAERGGLTEADKATFIHRQLVETRQITKNVANILHQRFNNETDNHGNNMEQVRIVMLKSALVSQFRKQFQLYKVREVNDYHHAHDAYLNGVVANTLLKVYPQLEPEFVYGEYHQFDWFKANKATAKKQFYTNIMLFFAQKERIIDENGEILWDKKYLETIKKVLDYRQMNIVKKTEIQKGEFSKATIKPKGNSSKLIPRKENWDPMKYGGLDSPNMAYAVIIEHAKGKKKVVFEKKIIRITIMERKAFEKDEKSFLEKQGYRQPKVLTKLPKYTLYECENGRRRMLASANEAQKGNQQVLKGQLITLLHHAKNCEASDGKSLDYIESNREMFGELLAHVSEFAKRYTLADANLSKINQLFEQNKDNDIKVIAQSFVNLMAFNAMGAPASFKFFEATIERKRYTNLKELLSATIIYQSITGLYEARKRLDG

SEQ ID NO: 537 - protein, 1334 aa, Listeria monocytogenes
MKNPYTIGLDIGTNSVGWAVLTNQYDLVKRKMKVAGNSDKKQIKKNFWGVRLFDDGQTAVDRRMNRTARRRIERRRNRISYLQEIFAVEMANIDANFFCRLNDSFYVDSEKRNSRHPFFATIEEEVAYHKNYRTIYHLREELVNSSEKADLRLVYLALAHIIKYRGNFLIEGALDTKNTSVDGVYEQFIQTYNQVFMSNIEEGTLAKVEENIEVANILAGKFTRREKFERILQLYPGEKSTGMFAQFISLIVGSKGNFQKVFDLIEKTDIECAKDSYEEDLEALLAIIGDEYAELFVAAKNTYNAVVLSSIITVTATETNAKLSASMIERFDAHEKDLGELKAFIKLHLPKQYQEIFNNAAIDGYAGYIDGKTKQVDFYKYLKTILENIEGADYFIAKIEEENFLRKQRTFDNGAIPHQLHLEELEAIIHQQAKYYPFLREDYEKIKSLVTFRIPYFVGPLAKGQSEFAWLTRKADGEIRPWNIEEKVDFGKSAVDFIEKMTNKDTYLPKENVLPKHSLCYQKYMVYNELTKVRYIDDQGKTNYFSGQEKQQIFNDLFKQKRKVKKKDLELFLRNINHIESPTIEGLEDSFNASYATYHDLLKVGMKQEILDNPLNTEMLEDIVKILTVFEDKPMIKEQLQQFSDVLDGGVLKKLERRHYTGWGRLSAKLLVGIREKQSHLTILDYLMNDDGLNRNLMQLINDSNLSFKSIIEKEQVSTTDKDLQSIVADLAGSPAIKKGILQSLKIVDELVSIMGYPPQTIVVEMARENQTTGKGKNNSKPRYKSLEKAIKEFGSKILKEHPTDNQELKNNRLYLYYLQNGKDMYTGQELDIHNLSNYDIDHIVPQSFITDNSIDNLVLTSSAGNREKGGDVPPLEIVRKRKVFWEKLYQGNLMSKRKFDYLTKAERGGLTDADKARFIHRQLVETRQITKNVANILHQRFNNETDNHGNTMEQVRIVTLKSALVSQFRKQFQLYKVREVNDYHHAHDAYLNGVVANTLLKVYPQLEPEFVYGEYHQFDWFKANKATAKKQFYTNIMLFFGQKERIIDENGEILWDKKYLETIKKVLDYRQMNIVKKTEIQKGEFSKATIKPKGNSSKLIPRKENWDPMKYGGLDSPNMAYAVIIEHAKGKKKLIFEKKIIRITIMERKMFEKDEEAFLEEKGYRHPKVLTKLPKYTLYECEKGRRRMLASANEAQKGNQLVLSNHLVSLLYHAKNCEASDGKSLKYIEAHRETFSELLAQVSEFATRYTLADANLSKINNLFEQNKEGDIQAIAQSFVDLMAFNAMGAPASFKFFEATIDRKRYTNLKELLSSTIIYQSITGLYESRKRLDD

SEQ ID NO: 538 - protein, 874 aa, Listeria seeligeri; identical to SEQ ID NO: 180

SEQ ID NO: 539 - protein, 1087 aa, Listeriaceae bacterium
MKKLVLGLDIGVASVGWGIIDAENGDVVDTGVRLFSSRDASENESRRTSRQSRRLSRRKKHRRERIKQLLLAHDMDICDIVNENPYELRVKGLNEKLEVSEIYVALTHLAKRRGVSYLDDVVEEGGTIKSEHLNKNMEEIKSGKMPCEIQLERFEKYGQVRGMIEINQDTEESSFLVNIFRTSDYIKEAKTILATQQKFHKQITNEFIDEYIHIMASKRDYFIGPGNEKSRTDYGVYRTNGDTWDNLFEILIGKCSVFPEETRAARSSYVAQEFNLLNDLNNLKISNLESGKLSASQKHDIVEKVKNSKKFGTKDLLKYIASVCECKIEDIGGCRVDKNRKPIMHTFENYRKVHNALNEAGVDLRLSETDYDELMKIMTLNSETLEIKKQCKEKLPQLTEDYLNVCLVLNKKGAFSGWHALSLKAMKLMMPELYGTSKNQMQIIHTMQLGKAYLKPLNQQKYLNSEAILEEIYNPIAARSIRQTIKVTNAILKKYGHLDSVIIEMPRDYQTSEDERKMIEKMQKENEKEKKAALKRAREEYPFPDEAFRNHKELATKLRLWYQQDQFCVYSGRKISVVDLVRNPNQFEIDHIIPQSVSLDDSLNNKVLCFSEENQKKGQQTPFYYHKGKSGNWTYEQYKLFVEKLFDKKKISNKKRELLLFEEDINKWDVRRGFIARNLVDTRYASRVILNSYQQYFGNHEMGTKVKVVRGKFTSQLRKKWRIFKDRNESHSHHAIDALIVAATANLRLWKKNTLGVSDEGKVYDKETGEILPFEKLTESEYNEMMNKEPYLNFKTKLQNIETKVKYSYRVSKKVNRKISDATIYSTRERDGIDYIVGKIKNIYDVKTYKDQFLKRYKKNKEQFLMYQHDPQTFAILENIMATYQDAENPFLAYKKEYGVIRKYSKKGGGSPVTSLKFIDKVLGQKIDLTAKNQAALPKNKKVVLQSITPYRADVYYDEIDKRYHLIGVKYSLFSFSKQGYVINPIAYQKLLEKEQIHSEMKFCFSLYREDIIEFGEDPDSLTRYRFWSKNESGKNKIEVKPIEKPNFEKQTVLTITKKIKILNKYQTDVLGNSFKAQEEKDPRNIE

SEQ ID NO: 540 - protein, 1345 aa, Marinilabilia sp.
MKKILGLDLGTTSIGWAFIKEPEKDVVGSEIVDMGVRIVALSSDEENDFAKGNTISINADRTLKRGARRNLQRFKLRRDALLEIFKEMKLIPSNFKYAEDGPSSTFSTLKLRDKAAKEKIELDDLVKVLLQINKKRGYRSSRKAKSEEDDGSAIDSMGIAKELYENDLTPGQWVFEALQKGRKNVPDFYRSDLQEEFKKIVNYQSEFYPDVLNSSFVEDWMGKASTPTKQYFNKKGVHLAENKGKREERRLQEYNWRAVAVNSKIDLSEIALILSQINSQISNSSGYLGAISDRSKELYFKNQTVGQYLYQQIKINPHTRLKGQVFYRQDYLDEFEKIWSVQSGFHPQLNDALKKEIRDITIFFQRRLKSQKHLISNCEFEDYHKVVPKSHPIFQEFRIWQNLNNLTLIKKDNLNEKSELALEDKIALANELAFKREQSVKDALNILGLKSSEWEFNFTKIEGNRTNHAFFEAFAKIIEIEDGEPLDLGNLKADDILDQFSEAFLRIGIDPGLLQVNNDIEGPNYEKQPYIQFWHLLYSSEDDQKLKQNLIKKFGFKPDHAKILASISLQDDHASLSSRAIKKILPHLQSGLIYDKACTYAGYNHSSSFTKEENEKRELSSELDLLKKNSLRNPVVEKILNQMINVVNAILKDPNLGKPDEIRVEMARELKANAEQRKNMTSNIASATRDHEKYREILKKEFGLKRVTKNDLLRYKLWLETDGISLYTGKPIEASKLFSKEYDIEHIIPKTRLFDDSFSNKTICERQLNIDKANVTAFSFLQNKLSGDEFEQYQSRVKSLFGKLSKAKIQKLLMANDKIPEDFIARQLQETRYISKKAKEILFEITRRVSVTTGTITDKLREDWGLVEIMKELNWEKYDKLGLTYTIEGKHGERLNKIKDWSKRNDHRHHAMDALTVALTKPAYIQYLNNLNAKELNGKKSTEIFAIEQKYLKRENGKLCFIPPVENIRTEAKKHLSKVLISYKAKNKVVTINKNRTNKKAGFNEQIALTPRGQLHKETVYGKAFHYSTKFEKIGASFDVQKINAVAKKEEREALLKRLAENGDDPKKAFTGKNSLSKMPIYLDLKRNIKLPEKVKTVVLEQNYTIRKNIDPDLKLDKVIDVGVKRILENRLKEFGGNAKLALSNLDENPIWLNKEKGITIKRVKISGVSNVESLHVKKDHFGEPILDQVGNEIPVDFVSTGNNHHVAIYEDEKGNLQEEVVSFFEAVVRQNQGLPIINKNHSLGWKFLFTLKQNEYFVFPSDDFDPTDVDLMDEENYHLISPNLFRVQKFTTKDYFFRHHLETTVEDKSELKGVSFKRLGLPGLNCIKKIRINHLGKIIQVGEY

SEQ ID NO: 541 - protein, 1091 aa, Mobiluncus mulieris
MDSRKYRVGIDVGTNSVGFAAVEEDDSGSPTRFLNTMVVIHDSGVDSEQKKYAITRLASAGTARRTRRLYRTRRQRLRELDDFISNELGYPLVNLENFADPYEPWKVRADLATTKLPNDELPEAMSIALRHMARHRGWRSPYQRVEALHLHAEISKEFAALKERVVEKTGDVFSDDATPAEVLVDLMGRQKVRGADGVLSGKLRQSDNANELRKIASVQGIDDETLNRIIDRVFSSKSPKGKASERVGMDALPGQGSKPRALKAMPSFQKFRVVSVICNLRIKDSGGDARPLSMEEKEKLIDYLMSSTTDDHVTWTDVADLLHVKRSQLQGTAKEGFDGERPYTRPPVNSTWSKIKDSKIKSLVALWKTGDVDVQSAIVEALSNASVLEDSRPGADIVVAYLESLDDKELESLDKVGLPAGRASYSEDSLERLTERMLRDDCDLFEARKREFNVADDWKPPADPIYAPVGNPGVDRVLKIVNRLLMAAEREWGAPTQINIEHVRSGFSSELMQREFERENERRRAQNEEAVKAILTEKGGNSRVSKYDITRYYAVKRQHCQCLYCGTPITFSDCELDHIVPRKGVGSTNTRVNLAAACRSCNRDKSNLPFAVWAGKASNFDVSIDDAVSRVKQWQRSQNEGVREFRAFQNEVISRLLKTTEDPEIDSRSLESVAWMARELHHRVEYYFQSKGAQTQVSVYRGAVTAQARKSSGLEDKVKMIGGGGKTRLDRRHHAMDAATIALMTPGISTTLSEKNNLRDAQKFTGQSETWKDYCGRTETARKHFAVWKSNMERLTDLFNDKLENDAIPVVQPLRLRLSNSKAHDDGIGKLDSKKLGSVWSLADIDRAATPQIWTALTRCDDFDPTKGLPENANRVIRAQGVKYESEDNIPVFPSNVAAIAVRDGYAEIGSTIHHARIYRIDDGKKTFYSMIRVFAVDLLKHQAEDLFTVKLPPSAISIRTCEDSLRRALSNGTAEYLGWLVPGDEIIVDTSDKAFHTGQIGDLLRNFPVNSFRLTGFPSNSRLRLKPVLLAGEGLRDDAEDSIKKILLGQGWRPAINVLFSKGKPRIVRRNSLGIERPSSNNGLPFSWEA

SEQ ID NO: 542 - protein, 1233 aa, Mycoplasma canis
MEKKRKVTLGFDLGIASIGWAIVDSETNQVYKLGSRLFDAPDTNLERRTQRGTRRLLRRRKYRNQKFYNLVKRTEVFGLSSREAIENRFRELSIKYPNIIELKTKALSQEVCPDEIAWILHDYLKNRGYFYDEKETKEDFDQQTVESMPSYKLNEFYKKYGYFKGALSQPTESEMKDNKDLKEAFFFDFSNKEWLKEINYFFNVQKNILSETFIEEFKKIFSFTRDISKGPGSDNMPSPYGIFGEFGDNGQGGRYEHIWDKNIGKCSIFTNEQRAPKYLPSALIFNFLNELANIRLYSTDKKNIQPLWKLSSIDKLNILLNLFNLPISEKKKKLTNANINDIVKKESTKSIMLSVEDIDMIKDEWAGKEPNVYGVGLSGLNIEESAKENKFKFQDLKILNVLINLLDNVGIKFEFKDRNDIIKNLELLDNLYLFLIYQKESNNKDSSIDLFIAKNELLNIENLKLKLKEFLLGAGNEFENHNSKTHSLSKKAIDAILPKLLDNNEGWNLEAIKNYDEEIKSQIEDNSSLMAKQDKKYLNDNFLKDAILPPNVKVTFQQAILIFNKIIQKFSKDFEIDKVVIELAREMTQDQENDALKGIAKAQKSKKSLVEERLEANNIDKSVFNDKYEKLIYKIFLWISQDFKDPYTGAQISTNEIVNNKVEIDHIIPYSLCFDDSSANKVLVHKQSNQEKSNSLPYEYIKQGHSGWNWDEFTKYVKRVFVNNVDSILSKKERLKKSENLLTTSYDGYDKLGFLARNLNDTRYATILFRDQLNNYAEHHLIDNKKMFKVIAMNGAVTSFIRKNMSYDNKLRLKDRSDFSHHAYDAAIIALFSNKTKTLYNLIDPSLNGIISKRSEGYWVIEDRYTGEIKELKKEDWTSIKNNVQARKIAKEIEEYLIDLDDEVFFSRKTKRKTNRQLYNETIYGIAAKTDEDGITNYYKKEKFSILDDKDIYLRLLREREKFVINQSNPEVIDQIIEIIESYGKENNIPSRDEAINIKYTKNKINYNLYLKQYMRSLTKSLDQFSEEFINQMIANKTFVLYNPTKNTTRKIKFLRLVNDVKINDIRKNQVINKFNGKNNEPKAFYENINSLGAIVFKNSANNFKTLSINTQIAIFGDKNWDIEDFKTYNMEKIEKYKEIYGIDKTYNFHSFIFPGTILLDKQNKEFYYISSIQTVRDIIEIKFLNKIEFKDENKNPDTSKTPKRLMFGIKSIMNNYEQVDISPFGINKKIFE

SEQ ID NO: 543 - protein, 1233 aa, Mycoplasma canis
MEKKRKVTLGFDLGIASVGWAIVDSETNQVYKLGSRLFDAPDTNLERRTQRGTRRLLRRRKYRNQKFYNLVKRTEVFGLSSREAIENRFRELSIKYPNIIELKTKALSQEVCPDEIAWILHDYLKNRGYFYDEKETKEDFDQQTIESMPSYKLNEFYKKYGYFKGALSQPTESEMKDNKDLKEAFFFDFSNKEWLKEINYFFNVQKNILSETFIEEFKKIFSFTRDISKGPGSDNMPSPYGIFGEFGDNGQGGRYEHIWDKNIGKCSIFTNEQRAPKYLPSALIFNFLNELANIRLYSTDKKNIQPLWKLSSIDKLNILLNLFNLPISEKKKKLTSANINDIVKKESTKSIMLSVEDIDMIKDEWAGKEPNVYGVGLSGLNIEESAKENKFKFQDLKILNVLINLLDNVGIKFEFKDRNDIIKNLELLDNLYLFLIYQKESNNKDSSIDLFIAKNESLNIENLKLKLKEFLLGAGNEFENHNSKTHSLSKKAIDAILPKLLDNNEGWNLEAIKNYDEEIKSQIEDNSFLMAKQDKKYLNDNFLKDAILPPNVKVTFQQAILIFNKIIQKFSKDFEIDKVVIELAREMTQDQENDALKGIAKAQKSKKSLVEERLEANNIDKSVFNEKYEKLIYKIFLWISQDFKDPYTGAKISANEIVDNKVEIDHIIPYSLCFDDSSANKVLVHKQSNQEKSNSLPYEYIKQGHSGWNWDEFTKYVKRVFVNNVDSILSKKERLKKSENLLTTSYDGYDKLGFLARNLNDTRYATILFRDQLNNYAEHHLIDDKKMFKVIAMNGAVTSFIRKNMSYDNKLRLKNRNDFSHHAYDAAIIALFSNKTKTLYNLIDPSLNGIISKRSEGYWVIEDRYTGEIKELKKEDWTSIKNNVQARKIAKEIEEYLIDLDDEVFFSRKTKRKTNRQLYNETIYGIAAKTDEDGITNYYKKEKLSILDDKDIYLRLLREREKFVINQSNPEVIDQIIEIIESYGKENNIPSRDEAINIKYTKNKINYNLYLKQYMRSLTKSLDQFSEEFINQMIANKTFVLYNPTKNTTRKIKFLRLVNDVKINDIRKNQVINKFNGKNNEPKAFYENINSLGAIVFKNSANNFKTLSINTQIAIFGDKNWDIEDFKTYNMEKIEKYKEIYGIDKTYNFHSFIFPGTILLDKQNKEFYYISSIQTVRDIIEIKFLNKIEFKDENKNQDTSKTPKRLMFGIKSIMNNYEQVDISPFGINKKIFE

SEQ ID NO: 544 - protein, 1233 aa, Mycoplasma canis; identical to SEQ ID NO: 247

SEQ ID NO: 545 - protein, 1233 aa, Mycoplasma canis
MEKKRKVTLGFDLGIASVGWAIVDSETNQVYKLGSRLFDAPDTNLERRTQRGTRRLLRRRKYRNQKFYNLVKRTEVFGLSSREAIENRFRELSIKYPNIIELKTKALSQEVCPDEIAWILHDYLKNRGYFYDEKETKEDFDQQTVESMPSYKLNEFYKKYGYFKGALSQPTESEMKDNKDLKEAFFFDFSNKEWLKEINYFFNVQKNILSETFIEEFKKIFSFTRDISKGPGSDNMPSPYGIFGEFGDNGQGGRYEHIWDKNIGKCSIFTNEQRAPKYLPSALIFNFLNELANIRLYSTDKKNIQPLWKLSSVDKLNILLNLFNLPISEKKKKLTSTNINDIVKKESIKSIMISVEDIDMIKDEWAGKEPNVYGVGLSGLNIEENAKENKFKFQDLKILNVLINLLDNVGIKFEFKDRNDIIKNLELLDNLYLFLIYQKESNNKDSSIDLFIAKNKSLNIENLKLKLKEFLLGAGNEFENHNSKSHSLSKKAIDAILPKLLDNNEGWNLEAIKNYDEEIKSQIEDNSSLMAKQDKKYLNDNFLKDAILPPNVKVTFQQAILIFNKIIQKFSKDFEIDKVVIELAREMTQDQENDALKGMAKAQKSKKSLVEERLEANNIDKSVFNDKYEKLIYKIFLWISQDFKDPYTGAQISVNEIVNNKVEIDHIIPYSLCFDDSSANKVLVHKQSNQEKSNSLPYEYIKQGHSGWNWDEFTKYVKRVFVNNVDSILSKKERLKKSENLLTTSYDGYDKLGFLARNLNDTRYATILFRDQLNNYAEHHLIDNKKMFKVIAMNGAVTSFIRKNMSYDNKLRLKDRSDFSHHAYDAAIIALFSNKTKTLYNLIDPSLNGIISKRSEGYWVIEDRYTGEIKELKKEDWTSIKNNVQARKIAKEIEEYLIDLDDEVFFSRKTKRKTNRQLYNETIYGIAAKTDEDGITNYYKKEKFSILDDKDIYLRLLREREKFVINQSNPEVIDQIIEIIESYGKENNIPSRDEAINIKYTKNKINYNLYLKQYMRSLTKSLDKFSEEFINQMIANKTFVLYNPTKNTTRKIKFLRLVNDVKINDIRKNQVINKFNGKNNEPKAFYENINSLGAIVFKNSANNFKTLSINTQIAIFGDKNWDIEDFKTYNMEKIEKYKEIYGIDKTYNFHSFIFPGTILLDKQNKEFYYISSIQTVRDIIEIKFLNKIEFKDENKNQDTSKTPKRLMFGIKSIMNNYEQVDISPFGINKKIFE

SEQ ID NO: 546 - protein, 1233 aa, Mycoplasma canis
MEKKRKVTLGFDLGIASVGWAIVDSETNQVYKLGSRLFDAPDTNLERRTQRGTRRLLRRRKYRNQKFYNLVKRTEVFGLSSREAIENRFRELSIKYPNIIELKTKALSQEVCPDEIAWILHDYLKNRGYFYDEKETKEDFDQQTVESMPSYKLNEFYKKYGYFKGALSQPTESEMKDNKDLKEAFFFDFSNKEWLKEINYFFNVQKNILSETFIEEFKKIFSFTRDISKGPGSDNMPSPYGIFGEFGDNGQGGRYEHIWDKNIGKCSIFTNEQRAPKYLPSALIFNFLNELANIRLYSTDKKNIQPLWKLSSVDKLNILLNLFNLPISEKKKKLTSTNINDIVKKESIKSIMLSVEDIDMIKYEWAGKEPNVYGVGLSGLNIEESAKENKFKFQDLKILNVLINLLDNVGIKFEFKDRNDIIKNLELLDNLYLFLIYQKESNNKDSSIDLFIAKNKSLNIENLKLKLKEFLLGAGNEFENHNSKTHSLSKKAIDAILPKLLDNNEGWNLEAIKNYDEEIKSQIEDNSSLMAKQDKKYLNDNFLKDAILPPNVKVTFQQAILIFNKIIQKFSKDFEIDKVVIELAREMTQDQENDALKGIAKAQKSKKSLVEERLEANNIDKSVFDDKYEKLIYKIFLWISQDFKDPYTGAKISANEIVNNKVEIDHIIPYSLCFDDSSANKVLVHKQSNQEKSNSLPYEYIKQGHSGWNWDEFTKYVKRVFVNNVDSILSKKERLKKSENLLTTSYDGYDKLGFLARNLNDTRYATILFRDQLNNYAEHHLIDNKKMFKVIAMNGAVTSFIRKNMSYDNKLRLKDRSDFSHHAYDAAIIALFSNKTKTLYNLIDPSLNGIISKRSEGYWVIEDRYTGEIKELKKEDWTSIKNNVQARKIAKEIEEYLIDLDDEVFFSRKTKRKTNRQLYNETIYGIAAKTDEDGITNYYKKEKFSILDDKDIYLRLLREREKFVINQSNPEVIDQIIEIIESYGKENNIPSRDEAINIKYTKNKINYNLYLKQYMRSLTKSLDQFSEEFINQMIANKTFVLYNPTKNTTRKIKFLRLVNDVKINDIRKNQVINKFNGKNNEPKAFYENINSLGAIVFKNSANNFKTLSINTQIAIFGDKNWDIEDFKTYNMEKIEKYKEIYGIDKTYNFHSFIFPGTILLDKQNKEFYYISSIQTVRDIIEIKFLNKIEFKDENKNQDTSKTPKRLMFGIKSIMNNYEQVDISPFGINKKIFE

SEQ ID NO: 547 - protein, 1239 aa, Mycoplasma cynos
MEEKRKVTLGFDLGVASVGWAIVDSETNEVYKLGSRLFDIPDTNIDRRAKRGSRRLVRRRSYRNQKFYNLIKRTKTFGFLDKEAIEKEFVLLSIKYPNIIELKVKGLQEEVSKSEAVWILHDYLKNRGYFYDDKEEKDDLENPSIESMPSYKLYEFYKEYGYFKGALSSPTESEKNKDSDLEKAIFFNFSNKEWTKEINHFFKIQKNIFSEDFKAKFMEFFSFIRDISKGPGSENMPSQYSIFGKYGDDGMGGKYQHIWDKNIGKCSIFKDKVRAPKYLPSALFFNLLNELSNIRLYSVDKREKSVLWRLSSKDKINIILNILQIILFKNDGKISNLDINKIVKNESIKSIILNEIDLDLIKDMWFEKEPNVYGIGLSGLNIEENKKENRFKFQDLKIFSVFIDLLKKSNINIEFNNEKDIIHNLKLLDELYFFLITQKYSRDKYGSIKKFILNNKSFNIDNLDEKLNIFLSISDDEFDNHNSKTHSLSKEAIYFIFPKLLHNNEGWNLEAIKNYDIDVREEISKHSFGIKKQDKKYLDDAFLDDAILPPSVKVTIKQSILIFNKIIKKFSNKFQIDNVVIELAREMTQEKEMDAQKSLNRLKKSRKKIIEERLNANNIDSKMFRDKTGEISPNYIYKIYLWISQNFKDPYTGENISANDILKNNVEIDHIIPYSLCFDDSSSNKVLVFKHSNQSKGNFLPFDMISTFSENSVWNWKEYTQYVEKTFKTNLESILDKKERVKKADNLLTSSYDGYDKLGFLARNLNDTRYATILFRDQLINYSENHLIDSKKMFKVIAMNGGVTSFIRKNMSFDSGLKVKDRSIFSHHAYDAAIIALFSNKTKILYNLINPSLDGIISKRSEGYWVLEDRLTGEIRKLNYNDWQSIKNNVEVKKIAREIESHLSNLDNVVMFSRKSKRKTNKELYNETLYGIATRIDENGIKNYYKKEKFNILEDENIYLRLLNERENFIINRSNPEVIDAIIEIFETIDKNKIPARDVAKNIKYTDNKIKYNLYLKDYMRKLVDEFPDKFRKDFIEQMIAKKIFILFNPIKNTTRKIKSLRSINNNKIEDIRKKQVLEKFNTAKNEPRSFYESLNSLGAIIFKNNLNIYKKMSISSQIATFGDKNWKIDDINTYNKEKLNKYKEIYGIDETYDFYSFIFPGTILLDEKNKEFLYISSIQTLKDKIELKFLDRIEFEKKNVNSNLKPKIKREIISTKKLMSDYKIIKISPLGINKKIFE

SEQ ID NO: 548 - protein, 1269 aa, Mycoplasma gallisepticum
MNNSIKSKPEVTIGLDLGVGSVGWAIVDNETNIIHHLGSRLFSQAKTAEDRRSFRGARRLIRRRKYKLKRFINLIWKYNSYFGFKNKEDILNNYQEQQKLHNTVLNLKLEALNAKIDPKALSWILHDYLKNRGHFYEDNRDFNVYPTEELANYFGEYGYYKGIIDSKEDNDDKLEEGLTKYKFSNQHWLEEIKKVLSNQTGLPEKFKEEYESLFSYVRNYSEGPGSINSVSPYGIYHLDEKEGKVVQKYNNIWDKTIGKCSIFPDEYRAPKNSPIAMIFNEINELSTIRSYSIYLTGWFINQEFKKAYLNKLLDLLIKTNSEKPIDARQFKKLREETIAESIGKETLKDVEREEKLEKEDHKWKLKGLKLNTNGKIQYNDLSSLAKFVHKLKQHLKLDFLLEDQYTTLDKINFLQSLFVYLGKHLRYSNRVDSANLKEFSDSNKLFERVLQEQKDDLFKLFEQTDKDDEKILAQTHSLSTKAMLLAITRMTNLDNDEDNQKNNDKGWNFEAIKNFDQKFIDITKKNNNLSLKQDKRYLDDRFINDAILSPGVKRILREATKVFNAILKQFSEEYDVTKVVIELARELSEEKELENTKNYEKLIKKNSDKISERLEALDIAEDKIEDILKSPTKSYKVLLWLQQDHIDPYSQKEIAFEDILTKTEKTEIDHIIPYSISFDDSSSNKLLVLAESNQAKSNQTPYEFITSGNAGIKWEDYEAYCRKFKDGDTSLLDSTQRSKKFAKMMKTDTSSKYDIGFLARNLNDTRYATIVFRDALKDYANNHLVEDKPMFKVVCINGGVTSFLRKNFDKSWYAKKDRDKNIHHAVDASIISIFSNETKTLFNQLTQFADYKLFKNTDGSWKKIDPKTGVVTEVTDENWKQIRVRNQVSEIAKVINKCIQDSNIERKARYSRKIENKTNISLFNDTVYSAKKVGYEDQIKRKNLKTLDIHESAEENKNSKVKKQFVYRKLVNVSLLNNDKLADLFAEKEDILMYRANPWVINLAEQIFNEYTENKKIKSQNVFEKYMLDLTKEFPEKFSEAFVKSMLRNKTAIIYNVEKKVVHRIKRLKILSSELKENKLSNVIIRSKNESGTKLSYQDTINSIALMIMRSIDPTAKKQYIRVPLNTLNLHLGDQDFDLHNIDAYLKKPKFVKYLKANEIGDEYKPWRVLTSGTLLIHKKDKKLMYISSFQNLKDVIEIKNLIETEYKENDDSDPKKKKKANRFLMTLSTILNDYILLDAKDNFDILGLSKNRIDEILNSKLGLDKITK

SEQ ID NO: 549 - protein, 1224 aa, Mycoplasma gallisepticum
MNNSIKSKPEVTIGLDLGVGSVGWAIVDNETNIIHHLGSRLFSQAKTAEDRRSFRGARRLIRRRKYKLKRFINLIWKYNSYFGFKNKEDILNNYQEQQKLHNTVLNLKLEALNAKIDPKALSWILHDYLKNRGHFYEDNRDFNVYPTEELANYFGEYGYYKGIIDSKEDNDDKLEEGLTKYKFSNQHWLEEIKKVLSNQTGLPEKFKEEYESLFSYVRNYSEGPGSINSVSPYGIYHLDEKEGKVVQKYNNIWDKTIGKCSIFPDEYRAPKNSPIAMIFNEINELSTIRSYSIYLTGWFINQEFKKAYLNKLLDLLIKTNSEKPIDARQFKKLREETIAESIGKETLKDVEREEKLEKEDHKWKLKGLKLNTNGKIQYNDLSSLAKFVHKLKQHLKLDFLLEDQYTTLDKINFLQSLFVYLGKHLRYSNRVDSANLKEFSDSNKLFERVLQEQKDDLFKLFEQTDKDDEKILAQTHSLSTKAMLLAITRMTNLDNDEDNQKNNDKGWNFEAIKNFDQKFIDITKKNNNLSLKQDKRYLDDRFINDAILSPGVKRILREATKVFNAILKQFSEEYDVTKVVIELARELSEEKELENTKNYEKLIKKNSDKISERLEALDIAEDKIEDILKSPTKSYKVLLWLQQDHIDPYSQKEIAFEDILTKTEKTEIDHIIPYSISFDDSSSNKLLVLAESNQAKSNQTPYEFITSGNAGIKWEDYEAYCRKFKDGDTSLLDSTQRSKKFAKMMKTDTSSKYDIGFLARNLNDTRYATIVFRDALKDYANNHLVEDKPMFKVVCINGGVTSFLRKNFDKSWYAKKDRDKNIHHAVDASIISIFSNETKTLFNQLTQFADYKLFKNTDGSWKKIDPKTGVVTEVTDENWKQIRVRNQVSEIAKVINKCIQDSNIERKARYSRKIENKTNISLFNDTVYSAKKVGYEDQIKRKNLKTLDIHESAEENKNSKVKKQFVYRKLVNVSLLNNDKLADLFAEKEDILMYRANPWVINLAEQIFNEYTENKKIKSQNVFEKYMLDLTKEFPEKFSEAFVKSMLRNKTAIIYNVEKKVVHRIKRLKILSSELKENKLSNVIIRSKNESGTKLSYQDTINSIALMIMRSIDPTAKKQYIRVPLNTLNLHLGDQDFDLHNIDAYLKKPKFVKYLKANEIGDEYKPWRVLTSGTLLIHKKDKKLMYISSFQNLKDVIEIKNLIETEYKENDDSDPKKRRKQIGS

SEQ ID NO: 550 - protein, 1269 aa, Mycoplasma gallisepticum; identical to SEQ ID NO: 138

SEQ ID NO: 551 - protein, 226 aa, Mycoplasma iowae
MSNKKKITIGLDIGVSSVGWSILREDNVLIDYGSRLFPDAANAKDGKLENEARRSHRSMRRRIRRIKTRKNDLIKLLIKYNIISDQDELAKILEQGIVNETGNVPIVEIKYKGLKEKLSKEELLICLYHYIHKRGYFYITEEDLKENGENINRLPTEIQYDFYMKNGYYIGNEDNQKFSNLIWVKEIEKFLSKQSLDSNFVDEYISLFRRVRDYSDGPGSEKSPTP

SEQ ID NO: 552 - protein, 1304 aa, Mycoplasma synoviae
MLNNVQNLWKYLLLLIFDKKIIFLFKIKVILIRRYMENNNKEKIVIGFDLGVASVGWSIVNAETKEVIDLGVRLFSEPEKADYRRAKRTTRRLLRRKKFKREKFHKLILKNAEIFGLQSRNEILNVYKDQSSKYRNILKLKINALKEEIKPSELVWILRDYLQNRGYFYKNEKLTDEFVSNSFPSKKLHEHYEKYGFFRGSVKLDNKLDNKKDKAKEKDEEEESDAKKESEELIFSNKQWINEIVKVFENQSYLTESFKEEYLKLFNYVRPFNKGPGSKNSRTAYGVFSTDIDPETNKFKDYSNIWDKTIGKCSLFEEEIRAPKNLPSALIFNLQNEICTIKNEFTEFKNWWLNAEQKSEILKFVFTELFNWKDKKYSDKKFNKNLQDKIKKYLLNFALENFNLNEEILKNRDLENDTVLGLKGVKYYEKSNATADAALEFSSLKPLYVFIKFLKEKKLDLNYLLGLENTEILYFLDSIYLAISYSSDLKERNEWFKKLLKELYPKIKNNNLEIIENVEDIFEITDQEKFESFSKTHSLSREAFNHIIPLLLSNNEGKNYESLKHSNEELKKRTEKAELKAQQNQKYLKDNFLKEALVPLSVKTSVLQAIKIFNQIIKNFGKKYEISQVVIEMARELTKPNLEKLLNNATNSNIKILKEKLDQTEKFDDFTKKKFIDKIENSVVFRNKLFLWFEQDRKDPYTQLDIKINEIEDETEIDHVIPYSKSADDSWFNKLLVKKSTNQLKKNKTVWEYYQNESDPEAKWNKFVAWAKRIYLVQKSDKESKDNSEKNSIFKNKKPNLKFKNITKKLFDPYKDLGFLARNLNDTRYATKVFRDQLNNYSKHHSKDDENKLFKVVCMNGSITSFLRKSMWRKNEEQVYRFNFWKKDRDQFFHHAVDASIIAIFSLLTKTLYNKLRVYESYDVQRREDGVYLINKETGEVKKADKDYWKDQHNFLKIRENAIEIKNVLNNVDFQNQVRYSRKANTKLNTQLFNETLYGVKEFENNFYKLEKVNLFSRKDLRKFILEDLNEESEKNKKNENGSRKRILTEKYIVDEILQILENEEFKDSKSDINALNKYMDSLPSKFSEFFSQDFINKCKKENSLILTFDAIKHNDPKKVIKIKNLKFFREDATLKNKQAVHKDSKNQIKSFYESYKCVGFIWLKNKNDLEESIFVPINSRVIHFGDKDKDIFDFDSYNKEKLLNEINLKRPENKKFNSINEIEFVKFVKPGALLLNFENQQIYYISTLESSSLRAKIKLLNKMDKGKAVSMKKITNPDEYKIIEHVNPLGINLNWTKKLENNN

SEQ ID NO: 553 - protein, 1401 aa, Myroides injenensis
MKRILGLDLGTTSIGWAYVHEAENVNETSSIQKVGVRVNPLTTEEQTNFEKGKPITTNASRTLARSARRNLQRYKLRRDNLIQILKENNWINNTTSLTETGNHSTFETYELRNKAASEKLTLDQLSRVLLMLNKKRGYKSSRKVNSKEEGQLIDGMEVAKKLYHEQLTPGQLSLQLMNQGVKKLPDYYRSDLNQELESIWNFQQQFYPNILTDKFKEEINGKGLTSTSSAFWNIYNFNTAENKGSRDEKKKQALQWRSEALSKQLSKEIVAYIIADLNGQIYNSSGYLGAISDRSKELYFNNLTVGQYLFKQLKSNPHTSLKNQVFYRQDYLNEFEKIWETQSKFYPKELTAALKREIRDVIIFYQRKLKSQKGLISFCEFEQKQKTINGKTKTIGHRVIPKSSPLFQEFKIWQQLHNVVLRNKKTNEIVSLADEQKVHLFEELNLKGKLKSNQVLKLIENKPKDWELNYTELEGNNTNKALYNAYLDILDIEGYDVRNELKVKLNKDDIELSDLDVNASEIKEMIFSVFKHLGINTEILEFDATLEDKVFEKQASYQLWHLLYSYEEDNSPTGLDRLYNLLHKKFGFKLNHAKLIGNVLFQDDYGSLSSKAIKNIFPYITENNYYTACELAGYKHSKHSLTKEENETRELKNRLTILPKNSLRNPVVEKIINQMINVVNTLIDEENNILIAQGKEPNFQFDEIRIELARELKKNAKEREELTKSINKSKTDHEKIIKILQKEDGIKNPTRNDIVRFKLYSELKNNGYKDLYTNEYIERKDIFTKEYDIEHIIPQSKLFDDSFSNKTLVRRNVNLKKGNQTAYDFILCEYGQEKANEFETRITNLYNLGKDEGISKSKFKKLLMQESEIGNGFIERDLRETQYIAKKAKSLLLEITRNVISTSGSITDRLREDWGLINVMKELNLQKYRDAGLTEFVKMKDGNKKEVIIDWTKRNDHRHHAMDALTIAFTKHNHIQYLNHLNARKNVNNELHNNIIAIEKLETTLVSDERGNKKRIFKEPIANFRTIAKSHLEAILVSHKAKNKVVTKNINKISGKKISQQTLTPRGQLHKETIYGKIRQYVSKQEKVGPKFTIEVIEQVSNPTYRNLLLKRLEENNNDPKKAFGGKNSLNKNPIYINLEKNIKVPEVLKLVWLEDNYTIRKEISPDLKIDKVIDQGVKQILQNRLAQYKGDSKLAFSNLDANPIWLNEDKGIAIKRVTISGIATAQPLHRKKDHLGQPILDHNGQEIPVDFISTGNNHHVAIYEDENGKLQESVVSHFEAVERVNQKLPIIDKTFNQHLGWKFLFTMKQNELFLFPSDDFNPNEIDLFDKQNYTVISKHLFRIQKLSTKDYSFRHHLETNVEEIKDLKTITWRREGLNGIQNIIKVRTNHLGEIIHIGEY

SEQ ID NO: 554 - protein, 1466 aa, Myroides odoratus
MKNILGLDLGTNSIGWALVKEDFENKQGEILGLGSRIIPMSQDILGEFGRGNSISQTADRTGYRGVRRLRERHLLRRERLHRVLNILGFLPNHYAKEIDFTKRLGKFINHAEPKLSFDKEFIFKDSFNEMLKDFQQNQPGFIINKHGEEALVPYDWTIYYLRKKALTQKIDKEELAWILLNFNQKRGYYQLRGEEEEENTNKLVEFYSLKIIDVIADNEVNKKGEVWYSLHLENGWIYRRSSKISLVDWKDKVRDFIVTTDVNDDGSEKLDKDGVVKRSFRAPSADDWTLLKKKTEQDIDNSNKTVGAYIYENLLLNPKQKIKGKLVRTIERKFYKDELKQILEKQKEFHQELQNEQLLQDCVRELYKYNEQHQQMLESKDFVHLFLNDIIFYQRPLRSQKSLISNCTLEKRVSRDGVVFPIKVISKSNPYYQEFRLLQWLQNLAIYRKDDDVNVTQEFLNSIESWENLLQFLNAKKEIKQEQLIKFLLEQKGLKGNSLKTAILTYRWNYVTDKVYPMNETRSLIQDKLKKVENVATDFLSFDNEMALWHIIYSVNDKIEYEKALAKFASKHNLDEISFVESFKKFPPFKSDYGSFSEKAIKKLLPLMRFGSVWNKNNIVPSVLDRIDKILTGEYDEKIKIRVREKAEQFQLNQIEDFQNLPLWLAQYVVYDRHSEAEIAGKWNSVKDLENYLKEFKQHSLRNPIVEQIITETLRVVKDIWQQYGNGVQNFFDEIHIELGREMKNTADERKRITNSVTENENTNLRIKALLVELKEDTNIENVRPHSPMQQEILKIYEEGVLNAVENIDEDILKISKTAQPSKSELIRYKLWLEQKYQSPYTGEMIPLSRLFTSDYEIEHVIPQSRYFDDSLSNKVICEAAVNKRKDNQLGLEFIKNHHSEKIELGNGRTAQVLEVEAYESFVKKNYDKNRGKRNKLLLEDVPEKMIERQLNDTRYISKFVTHLLSNIVRKDEVNSKDDGINSKNIIPGNGKITSQLKQDWGLNDVWNELILPRFERMNNLTNSTDFTSTNTNGKIIPTVPLEYSKGFSKKRIDHRHHALDALVIALATRDHVNLLNNESALPKKDRTKEEQKSFRFDLQVNLRNKEKYFNVKEGREKEKFTTFKKPWNTLTQDTRDALENMVVSFKQNLRVINKATNYYESYTDENGNLRLDKYGNPKKELISQKGTNWAIRKSLHKETVSGQIHLDRVKVTKGKIVTATRKSLDSSFNEKSIESITDTGIQKILRNYLKAKDNKPDVAFSPEGIEELNKSISVYNEGKNHQPIIKVRIFEQGSKFPVGETGNKIAKFVEAAKGTNLFFGIYQDKTGKRSYDTIPLNLVIERLKQGLSPVPETNEKGHQLLFHLSPNDLVYVPTIDDNEQLDSNRVYKFTDSSDTTCNFIPSNISAIIFNINSKEQEKRGINYPIQNELGVGSPQSKNQKSFDGFMIKEVCIKLKVDRLGNISKT

SEQ ID NO: 555 - protein, 241 aa, Neisseria lactamica
MAAFKPNPMNYILGLDIGIASVGWAMVEIDKEENPIRLIDLGVRVFERAEMPKTGDSLAMARRLARSVRRLTRRRAHRLLRARRLLKREGVLQDADFDENGLVKSLPNTPWQLRAAALDRKLTCLEWSAVLLHLIKHRGYLSQRKNEGETADKELGALLKGVADNAHALQTGDFRTPAELALNKFEKESGHIRNQRGDYSHTFSRKDLQAELNLLFEKQKEFGNPHVSDGLKEGIETLLMA

SEQ ID NO: 556 - protein, 666 aa, Neisseria lactamica
MAAFKPNPMNYILGLDIGIASVGWAMVEVDEEENPIRLIDLGVRVFERAEVPKTGDSLAMARRLARSVRRLTRRRAHRLLRARRLLKREGVLQDADFDENGLVKSLPNTPWQLRAAALDRKLTCLEWSAVLLHLVKHRGYLSQRKNEGETADKELGALLKGVADNAHALQTGDFRTPAELALNKFEKESGHIRNQRGDYSHTFSRKDLQAELNLLFEKQKEFGNPHVSDGLKEDIETLLMAQRPALSGDAVQKMLGHCTFEPAEPKAAKNTYTAERFIWLTKLNNLRILEQGSERPLTDTERATLMDEPYRKSKLTYAQARKLLGLEDTAFFKGLRYGKDNAEASTLMEMKAYHAISRALEKEGLKDKKSPLNLSTELQDEIGTAFSLFKTDKDITGRLKDRVQPEILEALLKHISFDKFVQISLKALRRIVPLMEQGKRYDEACAEIYGDHYCKKNAEEKIYLPPIPADEIRNPVVLRALSQARKVINCVVRRYGSPARIHIETAREVGKSFKDRKEIEKRQEENRKDREKAAAKFREYFPNFVGEPKSKDILKLRLYEQQHGKCLYSGKEINLVRLNEKGYVEIDHALPFSRTWDDSFNNKVLVLGSENQNKGNQTPYEYFNGKDNSREWQEFKARVETSRFPRSKNNGFCCKNSMKKDLKNAT

SEQ ID NO: 557 - protein, 828 aa, Neisseria lactamica
MLGHCTFEPAEPKAAKNTYTAERFIWLTKLNNLRILEQGSERPLTDTERATLMDEPYRKSKLTYAQARKLLGLEDTAFFKGLRYGKDNAEASTLMEMKAYHAISRALEKEGLKDKKSPLNLSTELQDEIGTAFSLFKTDKDITGRLKDRVQPEILEALLKHISFDKFVQISLKALRRIVPLMEQGKRYDEACAEIYGDHYGKKNTEEKIYLPPIPADEIRNPVVLRALSQARKVINAVVRRYDSPARIHIETAREVGKSFKDRKEIEKRQEENRKDREKAAAKFREYFPNFVGEPKSKDILKLRLYEQQHGKCLYSGKEINLVRLNEKGYVEIDHALPFSRTWDDSFNNKVLVLGSENQNKGNQTPYEYFNGKDNSREWQEFKARVETSRFPRSKKQRILLQKFDEEGFKERNLNDTRYVNRFLCQFVADHILLTGKGKRRVFASNGQITNLLRGFWGLRKVRAENDRHHALDAVVVACSTVAMQQKITRFVRYKEMNAFDGKTIDKETGEVLHQKAHFPQPWEFFAQEVMIRVFGKPDGKPEFEEADTSEKLRTLLAEKLSSRPEAVHEYVTPLFVSRAPNRKMSGQGHMETVKSAKRLDEGISVLRVPLTQLKLKDLEKMVNREREPKLYDALKAQLETHKDDPAKAFAEPFYKYDKAGSRTQQVKAVRIEQVQKTGVWVRNHNGIADNATMVRVDVFEKGGKYYLVPIYSWQVAKGILPDRAVVAFKDEEDWTVMDDSFEFRFVLYANDLIKAELKKETFFGYFSGLDRSTGNISLRSHDLDKTKGKDGVYRIGIKTALSFQKHQIDELGKEIRPCRLKKRPPVR

SEQ ID NO: 558 - protein, 408 aa, Neisseria lactamica
MNDTRYVNRFLCQFVADHILLTGKGKRRVFASNGQITNLLRGFWGLRKVRTENDRHHALDAVVVACSTVAMQQKITRFVRYKEMNAFDGKTIDKETGEVLHQKAHFPQPWEFFAQEVMIRVFGKPDGKPEFEEADTPEKLRTLLAEKLSSRPEAVHEYVTPLFVSRAPNRKMSGQGHMETVKSAKRLDEGISVLRVPLTQLKLKGLEKMVNREREPKLYDALKAQLETHKDDPAKAFAEPFYKYDKAGSRTQQVKAVRIEQVQKTGVWVRNHNGIADNATMVRVDVFEKGGKYYLVPIYSWQVAKGILPDRAVVAFKDEEDWTVMDDSFEFRFVLYANDLIKLTAKKNEFLGYFVSLNRATGAIDIRTHDTDSTKGKNGIFQSVGVKTALSFQKTKSTNSAKKSDHAV

SEQ ID NO: 559 - protein, 1082 aa, Neisseria meningitidis
MAAFKPNPINYILGLDIGIASVGWAMVEIDEDENPICLIDLGVRVFERAEVPKTGDSLAAARRLARSVRRLTRRRAHRLLRARRLLKREGVLQAADFDENGLIKSLPNTPWQLRAAALDRKLTPLEWSAVLLHLIKHRGYLSQRKNEGETADKELGALLKGVADNAHALQTGDFRTPAELALNKFEKESGHIRNQRGDYSHTFSRKDLQAELILLFEKQKEFGNPHVSGGLKEGIETLLMTQRPALSGDAVQKMLGHCTFEPAEPKAAKNTYTAERFIWLTKLNNLRILEQGSERPLTDTERATLMDEPYRKSKLTYAQARKLLGLEDTAFFKGLRYGKDNAEASTLMEMKAYHAISRALEKEGLKDKKSPLNLSPELQDEIGTAFSLFKTDEDITGRLKDRVQPEILEALLKHISFDKFVQISLKALRRIVPLMEQGKRYDEACAEIYGDHYGKKNTEEKIYLPPIPADEIRNPVVLRALSQARKVINGVVRRYGSPARIHIETAREVGKSFKDRKEIEKRQEENRKDREKAAAKFREYFPNFVGEPKSKDILKLRLYEQQHGKCLYSGKEINLGRLNEKGYVEIDHALPFSRTWDDSFNNKVLVLGSENQNKGNQTPYEYFNGKDNSREWQEFKARVETSRFPRSKKQRILLQKFDEDGFKERNLNDTRYVNRFLCQFVADRMRLTGKGKKRVFASNGQITNLLRGFWGLRKVRAENDRHHALDAVVVACSTVAMQQKITRFVRYKEMNAFDGKTIDKETGEVLHQKTHFPQPWEFFAQEVMIRVFGKPDGKPEFEEADTPEKLRTLLAEKLSSRPEAVHEYVTPLFVSRAPNRKMSGQGHMETVKSAKRLDEGVSVLRVPLTQLKLKDLEKMVNREREPKLYEALKARLEAHKDDPAKAFAEPFYKYDKAGNRTQQVKAVRVEQVQKTGVWVRNHNGIADNATMVRVDVFEKGDKYYLVPIYSWQVAKGILPDRAVVQGKDEEDWQLIDDSFNFKFSLHPNDLVEVITKKARMFGYFASCHRGTGNINIRIHDLDHKIGKNGILEGIGVKTALSFQKYQIDELGKEIRPCRLKKRPPVR

SEQ ID NO: 560 - protein, 976 aa, Neisseria meningitidis
MAAFKPNPINYILGLDIGIASVGWAMVEIDEDENPICLIDLGVRVFERAEVPKTGDSLAAARRLARSVRRLTRRRAHRLLRARRLLKREGVLQAADFDENGLIKSLPNTPWQLRAAALDRKLTPLEWSAVLLHLIKHRGYLSQRKNEGETADKELGALLKGVADNAHALQTGDFRTPAELALNKFEKESGHIRNQRGDYSHTFSRKDLQAELILLFEKQKEFGNPHVSGGLKEGIETLLMTQRPALSGDAVQKMLGHCTFEPAEPKAAKNTYTAERFIWLTKLNNLRILEQGSERPLTDTERATLMDEPYRKSKLTYAQARKLLGLEDTAFFKGLRYGKDNAEASTLMEMKAYHAISRALEKEGLKDKKSPLNLSPELQDEIGTAFSLFKTDEDITGRLKDRIQPEILEALLKHISFDKFVQISLKALRRIVPLMEQGKRYDEACAEIYGDHYGKKNTEEKIYLPPIPADEIRNPVVLRALSQARKVINGVVRRYGSPARIHIETAREVGKSFKDRKEIEKRQEENRKDREKAAAKFREYFPNFVGEPKSKDILKLRLYEQQHGKCLYSGKEINLGRLNEKGYVEIDHALPFSRTWDDSFNNKVLVLGSENQNKGNQTPYEYFNGKDNSREWQEFKARVETSRFPRSKKQRILLQKFDEDGFKERNLNDTRYVNRFLCQFVADRMRLTGKGKKRVFASNGQITNLLRGFWGLRKVRAENDRHHALDAVVVACSTVAMQQKITRFVRYKEMNAFDGKTIDKETGEVLHQKTHFPQPWEFFAQEVMIRVFGKPDGKPEFEEADTPEKLRTLLAEKLSSRPEAVHEYVTPLFVSRAPNRKMSGQGHMETVKSAKRLDEGVSVLRVPLTQLKLKDLEKMVNREREPKLYEALKARLEAHKDDPAKAFAEPFYKYDKAGNRTQQVKAVRVEQVQKTGVWVRNHNGIADNATMVRVDVFEKGDKYYLVPIYSWQVAKGIFAG

SEQ ID NO: 561 - protein, 1081 aa, Neisseria meningitidis
MAAFKPNPINYILGLDIGIASVGWAMVEIDEDENPICLIDLGVRVFERAEVPKTGDSLAAARRLARSVRRLTRRRAHRLLRARRLLKREGVLQAADFDENGLIKSLPNTPWQLRSAALDRKLTPLEWSAVLLHLIKHRGYLSQRKNEGETADKELGALLKGVADNAHALQTGDFRTPAELALNKFEKESGHIRNRRGDYSHTFSRKDLQAELDLLFEKQKEFGNPHISDDLKEGIETLLMTQRPALSGDAVQKMLGHCTFEPTEPKAAKNTYTAERFVWLTKLNNLRILEQGSERPLTDTERATLMDEPYRKSKLTYAQARKLLELDDTAFFKGLRYGKDNAEASTLMEMKAYHAISRALEKEGLKDKKSPLNLSPELQDEIGTAFSLFKTDEDITGRLKDRVQPEILEVLLKHISFDKFVQISLKALRRIVPLMEQGKRYDEACAEIYGDHDGKKNTEEKIYLPPIPADEIRNPVVLRALSQARKVINAVVRRYGSPARIHIETAREVGKSFKDRKEIEKRQEENRKDREKAAAKFREYFPNFVGEPKSKDILKLRLYEQQHGKCLYSGKEINLGRLNEKGYVEIDHALPFSRTWDDSFNNKVLVLGSENQNKGNQTPYEYFNGKDNSREWQEFKARVETSRFPRSKKQRILLQKFDEEGFKERNLNDTRYVNRFLCQFVADHMLLTGKGKRRVFASNGQITNLLRGFWGLRKVRAENNRHHALDAVVVACSTVAMQQKITRFVRYKEMNAFDGKTIDKETGEVLHQKTHFPQPWEFFAQEVMIRVFGKPDGKPEFEEADTPEKLRTLLAEKLSSRPEAVHEYVTPLFVSRAPNRKMSGQGHMETVKSAKRLDEGVSVLRVPLTQLKLKDLEKMVNREREPKLYEALKARLEAHKDDPAKAFAEPFYKYDKAGNRTQQVKAVRVEQVQKTGVWVRNHNGIADNATMVRVDVFEKAGKYYLVPIYSWQVAKGILPDRAVVAYADEEGWTVIDESFRFKFVLYSNDLIKVQLKKDSFLGYFSGLDRATGAISLREHDLEKSKGKDGMHRIGVKTALSFQKYQIDEMGKEIRLCRLKKRPPVR

SEQ ID NO: 562 - protein, 1081 aa, Neisseria meningitidis
MAAFKPNPINYILGLDIGIASVGWAMVEIDEDENPICLIDLGVRVFERAEVPKTGDSLAAARRLARSVRRLTRRRAHRLLRARRLLKREGVLQAADFDENGLIKSLPNTPWQLRSAALDRKLTPLEWSAVLLHLIKHRGYLSQRKNEGETADKELGALLKGVANNAHALQTGDFRTPAELALNKFEKESGHIRNQRGDYSHTFSRKDLQAELILLFEKQKEFGNPHVSGGLKEGIETLLMTQRPALSGDAVQKMLGHCTFEPAEPKAAKNTYTAERFIWLTKLNNLRILEQGSERPLTDTERATLMDEPYRKSKLTYAQARKLLGLEDTAFFKGLRYGKDNAEASTLMEMKAYHAISRALEKEGLKDKKSPLNLSPELQDEIGTAFSLFKTDEDITGRLKDRIQPEILEALLKHISFDKFVQISLKALRRIVPLMEQGKRYDEACAEIYGDHYGKKNTEEKIYLPPIPADEIRNPVVLRALSQARKVINGVVRRYGSPARIHIETAREVGKSFKDRKEIEKRQEENRKDREKAAAKFREYFPNFVGEPKSKDILKLRLYEQQHGKCLYSGKEINLGRLNEKGYVEIDHALPFSRTWDDSFNNKVLVLGSENQNKGNQTPYEYFNGKDNSREWQEFKARVETSRFPRSKKQRILLQKFDEDGFKERNLNDTRYVNRFLCQFVADRMRLTGKGKKRVFASNGQITNLLRGFWGLRKVRAENDRHHALDAVVVACSTVAMQQKITRFVRYKEMNAFDGKTIDKETGEVLHQKTHFPQPWEFFAQEVMIRVFGKPDGKPEFEEADTPEKLRTLLAEKLSSRPEAVHEYVTPLFVSRAPNRKMSGQGHMETVKSAKRLDEGVSVLRVPLTQLKLKDLEKMVNREREPKLYEALKARLEAHKDDPAKAFAEPFYKYDKAGNRTQQVKAVRVEQVQKTGVWVRNHNGIADNATMVRVDVFEKAGKYYLVPIYSWQVAKGILPDRAVVAYADEEGWTVIDESFRFKFVLYSNDLIKVQLKKDSFLGYFSGLDRATGAISLREHDLEKSKGKDGMHRIGVKTALSFQKYQIDEMGKEIRLCRLKKRPPVR

SEQ ID NO: 563 - protein, 1082 aa, Neisseria meningitidis
MAAFKPNPINYILGLDIGIASVGWAMVEIDEDENPICLIDLGVRVFERAEVPKTGDSLAMARRLARSVRRLTRRRAHRLLRARRLLKREGVLQAADFDENGLIKSLPNTPWQLRAAALDRKLTPLEWSAVLLHLIKHRGYLSQRKNEGETADKELGALLKGVADNAHALQTGDFRTPAELALNKFEKESGHIRNQRGDYSHTFSRKDLQAELILLFEKQKEFGNPHVSGGLKEGIETLLMTQRPALSGDAVQKMLGHCTFEPAEPKAAKNTYTAERFIWLTKLNNLRILEQGSERPLTDTERATLMDEPYRKSKLTYAQARKLLGLEDTAFFKGLRYGKDNAEASTLMEMKAYHAISRALEKEGLKDKKSPLNLSPELQDEIGTAFSLFKTDEDITGRLKDRIQPEILEALLKHISFDKFVQISLKALRRIVPLMEQGKRYDEACAEIYGDHYGKKNTEEKIYLPPIPADEIRNPVVLRALSQARKVINGVVRRYGSPARIHIETAREVGKSFKDRKEIEKRQEENRKDREKAAAKFREYFPNFVGEPKSKDILKLRLYEQQHGKCLYSGKEINLGRLNEKGYVEIDHALPFSRTWDDSFNNKVLVLGSENQNKGNQTPYEYFNGKDNSREWQEFKARVETSRFPRSKKQRILLQKFDEDGFKERNLNDTRYVNRFLCQFVADRMRLTGKGKKRVFASNGQITNLLRGFWGLRKVRAENDRHHALDAVVVACSTVAMQQKITRFVRYKEMNAFDGKTIDKETGEVLHQKTHFPQPWEFFAQEVMIRVFGKPDGKPEFEEADTPEKLRTLLAEKLSSRPEAVHEYVTPLFVSRAPNRKMSGQGHMETVKSAKRLDEGVSVLRVPLTQLKLKDLEKMVNREREPKLYEALKARLEAHKDDPAKAFAEPFYKYDKAGNRTQQVKAVRVEQVQKTGVWVRNHNGIADNATMVRVDVFEKGDKYYLVPIYSWQVAKGILPDRAVVQGKDEEDWQLIDDSFNFKFSLHPNDLVEVITKKARMFGYFASCHRGTGNINIRIHDLDHKIGKNGILEGIGVKTALSFQKYQIDELGEEIRPCRLKKRPPVR

SEQ ID NO: 564 - protein, 1082 aa, Neisseria meningitidis
MAAFKPNPINYILGLDIGIASVGWAMVEIDEDENPICLIDLGVRVFERAEVPKTGDSLAMARRLARSVRRLTRRRAHRLLRARRLLKREGVLQAADFDENGLIKSLPNTPWQLRAAALDRKLTPLEWSAVLLHLIKHRGYLSQRKNEGETADKELGALLKGVADNAHALQTGDFRTPAELALNKFEKESGHIRNQRGDYSHTFSRKDLQAELILLFEKQKEFGNPHVSGGLKEGIETLLMTQRPALSSDAVQKMLGHCTFEPAEPKAAKNTYTAERFIWLTKLNNLRILEQGSERPLTDTERATLMDEPYRKSKLTYAQARKLLGLEDTAFFKGLRYGKDNAEASTLMEMKAYHAISRALEKEGLKDKKSPLNLSPELQDEIGTAFSLFKTDEDITGRLKDRIQPEILEALLKHISFDKFVQISLKALRRIVPLMEQGKRYDEACAEIYGDHYGKKNTEEKIYLPPIPADEIRNPVVLRALSQARKVINGVVRRYGSPARIHIETAREVGKSFKDRKEIEKRQEENRKDREKAAAKFREYFPNFVGEPKSKDILKLRLYEQQHGKCLYSGKEINLGRLNEKGYVEIDHALPFSRTWDDSFNNKVLVLGSENQNKGNQTPYEYFNGKDNSREWQEFKARVETSRFPRSKKQRILLQKFDEDGFKERNLNDTRYVNRFLCQFVADRMRLTGKGKKRVFASNGQITNLLRGFWGLRKVRAENDRHHALDAVVVACSTVAMQQKITRFVRYKEMNAFDGKTIDKETGEVLHQKTHFPQPWEFFAQEVMIRVFGKPDGKPEFEEADTPEKLRTLLAEKLSSRPEAVHEYVTPLFVSRAPNRKMSGQGHMETVKSAKRLDEGVSVLRVPLTQLKLKDLEKMVNREREPKLYEALKARLEAHKDDPAKAFAEPFYKYDKAGNRTQQVKAVRVEQVQKTGVWVRNHNGIADNATMVRVDVFEKGDKYYLVPIYSWQVAKGILPDRAVVQGKDEEDWQLIDDSFNFKFSLHPNDLVEVITKKARMFGYFASCHRGTGNINIRIHDLDHKIGKNGILEGIGVKTALSFQKYQIDELGKEIRPCRLKKRPPVR

SEQ ID NO: 565 - protein, 1082 aa, Neisseria meningitidis
MAAFKPNPINYILGLDIGIASVGWAMVEIDEDENPICLIDLGVRVFERAEVPKTGDSLAMARRLARSVRRLTRRRAHRLLRARRLLKREGVLQAADFDENGLIKSLPNTPWQLRAAALDRKLTPLEWSAVLLHLIKHRGYLSQRKNEGETADKELGALLKGVADNAHALQTGDFRTPAELALNKFEKESGHIRNQRGDYSHTFSRKDLQAELILLFEKQKEFGNPHVSGGLKEGIETLLMTQRPALSSDAVQKMLGHCTFEPAEPKAAKNTYTAERFIWLTKLNNLRILEQGSERPLTDTERATLMDEPYRKSKLTYAQARKLLGLEDTAFFKGLRYGKDNAEASTLMEMKAYHAISRALEKEGLKDKKSPLNLSPELQDEIGTAFSLFKTDEDITGRLKDRIQPEILEALLKHISFDKFVQISLKALRRIVPLMEQGKRYDEACAEIYGDHYGKKNTEEKIYLPPIPADEIRNPVVLRALSQARKVINGVVRRYGSPARIHIETAREVGKSFKDRKEIEKRQEENRKDREKAAAKFREYFPNFVGEPKSKDILKLRLYEQQHGKCLYSGKEINLGRLNEKGYVEIDHALPFSRTWDDSFNNKVLVLGSENQNKGNQTPYEYFNGKDNSREWQEFKARVETSRFPRSKKQRILLQKFDEDGFKERNLNDTRYVNRFLYQFVADRMRLTGKGKKRVFASNGQITNLLRGFWGLRKVRAENDRHHALDAVVVACSTVAMQQKITRFVRYKEMNAFDGKTIDKETGEVLHQKTHFPQPWEFFAQEVMIRVFGKPDGKPEFEEADTPEKLRTLLAEKLSSRPEAVHEYVTPLFVSRAPNRKMSGQGHMETVKSAKRLDEGVSVLRVPLTQLKLKDLEKMVNREREPKLYEALKARLEAHKDDPAKAFAEPFYKYDKAGNRTQQVKAVRVEQVQKTGVWVRNHNGIADNATMVRVDVFEKGDKYYLVPIYSWQVAKGILPDRAVVQGKDEEDWQLIDDSFNFKFSLHPNDLVEVITKKARMFGYFASCHRGTGNINIRIHDLDHKIGKNGILEGIGVKTALSFQKYQIDELGKEIRPCRLKKRPPVR

SEQ ID NO: 566 - protein, 1081 aa, Neisseria meningitidis
MAAFKPNPINYILGLDIGIASVGWAMVEIDEDENPICLIDLGVRVFERAEVPKTGDSLAMARRLARSVRRLTRRRAHRLLRARRLLKREGVLQAADFDENGLIKSLPNTPWQLRAAALDRKLTPLEWSAVLLHLIKHRGYLSQRKNEGETADKELGALLKGVADNAHALQTGDFRTPAKLALNKFEKESGHIRNQRGDYSHTFSRKDLQAELNLLFEKQKEFGNPHISDGLKEGIETLLMTQRPALSGDAVQKMLGHCTFEPTEPKAAKNTYTAERFVWLTKLNNLRILEQGSEQPLTDTQRAKLMDEPYRKSKLTYAQARKLLGLEDTAFFKGLRYGKDNAEASTLMEMKAYHAISRALEKEGLKDKKSPLNLSPELQDEIGTAFSLFKTDEDITGRLKDRVQPEILEALLKHISFDKFVQISLKALRRIVPLMEQGKRYNEACAEIYGDHYGKKNTEEKIYLPPIPADEIRNPVVLRALSQARKVINGVVRRYGSPARIHIETAREVGKSFKDRKEIEKRQEENRKDREKAAAKFQEYFPNFVGEPKSKDILKLRLYEQQHGKCLYSGKEINLGRLNEKGYVEIDHALPFSRTWDDSFNNKVLVLGSENQNKGNQTPYEYFNGKDNSREWQEFKARVETSRFPRSKKQRILLQKFDEDGFKERNLNDTRYVNRFLCQFVADRMRLTGKGKKRVFASNGQITNLLRGFWGLRKVRAENDRHHALDAVVVACSTVAMQQKITRFVRYKEMNAFDGKTIDKETGEVLHQKTHFPQPWEFFAQEVMIRVFGKPDGKPEFEEADTPEKLRTLLAEKLSSRPEAVHEYVTPLFVSRAPNRKMSGQGHMETVKSAKRLDEGVSVLRVPLTQLKLKDLEKMVNREREPKLYEALKARLEAHKDDPAKAFAEPFYKYDKAGNRTQQVKAVRVEQVQKTGVWVRNHNGIADNATMVRVDVFEKGDKYYLVPIYSWQVAKGILPDRAVVAYADEEDWTVIDESFRFKFVLYSNDLIKVQLKKDSFLGYFSGLDRATGAISLREHDLEKSKGKDGMHRIGVKTALSFQKYQIDEMGKEIRPCRLKKRPPVR

SEQ ID NO: 567 - protein, 1081 aa, Neisseria meningitidis
MAAFKPNPINYILGLDIGIASVGWAMVEIDEEENPIRLIDLGVRVFERAEVPKTGDSLAMARRLARSVRRLTRRRAHRLLRARRLLKREGVLQAADFDENGLIKSLPNTPWQLRAAALDRKLTPLEWSAVLLHLIKHRGYLSQRKNEGETADKELGALLKGVADNAHALQTGDFRTPAELALNKFEKECGHIRNQRGDYSHTFSRKDLQAELNLLFEKQKEFGNPHVSGGLKEGIETLLMTQRPALSGDAVQKMLGHCTFEPAEPKAAKNTYTAERFIWLTKLNNLRILEQGSERPLTDTERATLMDEPYRKSKLTYAQARKLLSLEDTAFFKGLRYGKDNAEASTLMEMKAYHTISRALEKEGLKDKKSPLNLSPELQDEIGTAFSLFKTDEDITGRLKDRIQPEILEALLKHISFDKFVQISLKALRRIVPLMEQGKRYDEACAEIYGDHYGKKNTEEKIYLPPIPADEIRNPVVLRALSQARKVINGVVRRYGSPARIHIETAREVGKSFKDRKEIEKRQEENRKDREKAAAKFREYFPNFVGEPKSKDILKLRLYEQQHGKCLYSGKEINLGRLNEKGYVEIDHALPFSRTWDDSFNNKVLVLGSENQNKGNQTPYEYFNGKDNSREWQEFKARVETSRFPRSKKQRILLQKFDEDGFKERNLNDTRYVNRFLCQFVADRMRLTGKGKKRVFASNGQITNLLRGFWGLRKVRAENDRHHALDAVVVACSTVAMQQKITRFVRYKEMNAFDGKTIDKETGEVLHQKTHFPQPWEFFAQEVMIRVFGKPDGKPEFEEADTPEKLRTLLAEKLSSRPEAVHEYVTPLFVSRAPNRKMSGQGHMETVKSAKRLDEGVSVLRVPLTQLKLKDLEKMVNREREPKLYEALKARLEAHKDDPAKAFAEPFYKYDKAGNRTQQVKAVRVEQVQKTGVWVRNHNGIADNATMVRVDVFEKGDKYYLVPIYSWQVAKGILPDRAVVAYADEEDWTVIDESFRFKFVLYSNDLIKVQLKKDSFLGYFSGLDRATGAISLREHDLEKSKGKDGMHRIGVKTALSFQKYQIDEMGKEIRPCRLKKRPPVR

SEQ ID NO: 568 - protein, 1082 aa, Neisseria meningitidis
MAAFKPNPINYILGLDIGIASVGWAMVEIDEEENPIRLIDLGVRVFERAEVPKTGDSLAMARRLARSVRRLTRRRAHRLLRARRLLKREGVLQAADFDENGLIKSLPNTPWQLRAAALDRKLTPLEWSAVLLHLIKHRGYLSQRKNEGETADKELGALLKGVADNAHALQTGDFRTPAELALNKFEKECGHIRNQRGDYSHTFSRKDLQAELNLLFEKQKEFGNPHVSGGLKEGIETLLMTQRPALSGDAVQKMLGHCTFEPAEPKAAKNTYTAERFIWLTKLNNLRILEQGSERPLTDTERATLMDEPYRKSKLTYAQARKLLGLEDTAFFKGLRYGKDNAEASTLMEMKAYHAISRALEKEGLKDKKSPLNLSPELQDEIGTAFSLFKTDEDITGRLKDRIQPEILEALLKHISFDKFVQISLKALRRIVPLMEQGKRYDEACAEIYGDHYGKKNTEEKIYLPPIPADEIRNPVVLRALSQARKVINGVVRRYGSPARIHIETAREVGKSFKDRKEIEKRQEENRKDREKAAAKFREYFPNFVGEPKSKDILKLRLYEQQHGKCLYSGKEINLVRLNEKGYVEIDHALPFSRTWDDSFNNKVLVLGSENQNKGNQTPYEYFNGKDNSREWQEFKARVETSRFPRSKKQRILLQKFDEEGFKERNLNDTRYVNRFLCQFVADHILLTGKGKRRVFASNGQITNLLRGFWGLRKVRAENDRHHALDAVVVACSTVAMQQKITRFVRYKEMNAFDGKTIDKETGEVLHQKTHFPQPWEFFAQEVMIRVFGKPDGKPEFEEADTPEKLRTLLAEKLSSRPEAVHEYVTPLFVSRAPNRKMSGQGHMETVKSAKRLDEGVSVLRVPLTQLKLKDLEKMVNREREPKLYEALKARLEAHKDDPAKAFAEPFYKYDKAGNRTQQVKAVRVEQVQKTGVWVRNHNGIADNATMVRVDVFEKGGKYYLVPIYSWQVAKGILPDRAVVQGKDEEDWQLIDDSFNFKFSLHPNDLVEVITKKARMFGYFASCHRGTGNINIRIHDLDHKIGKNGILEGIGVKTALSFQKYQIDELGKEIRPCRLKKRPPVR

SEQ ID NO: 569 - protein, 1081 aa, Neisseria meningitidis
MAAFKPNPINYILGLDIGIASVGWAMVEIDEEENPIRLIDLGVRVFERAEVPKTGDSLAMARRLARSVRRLTRRRAHRLLRARRLLKREGVLQAADFDENGLIKSLPNTPWQLRAAALDRKLTPLEWSAVLLHLIKHRGYLSQRKNEGETADKELGALLKGVADNAHALQTGDFRTPAELALNKFEKESGHIRNQRGDYSHTFSRKDLQAELILLFEKQKEFGNPHVSGGLKEGIETLLMTQRPALSGDAVQKMLGHCTFEPAEPKAAKNTYTAERFIWLTKLNNLRILEQGSERPLTDTERATLMDEPYRKSKLTYAQARKLLGLEDTAFFKGLRYGKDNAEASTLMEMKAYHAISRALEKEGLKDKKSPLNLSPELQDEIGTAFSLFKTDEDITGRLKDRVQPEILEALLKHISFDKFVQISLKALRRIVPLMEQGKRYDEACAEIYGDHYGKKNTEEEIYLPPITADEIRNPVVLRALSQARKVINAVVRRYGSPARIHIETAREVGKSFKDRKEIEKRQEENRKDREKAAAKFREYFPNFVGEPKSKDILKLRLYEQQHGKCLYSGKEINLVRLNEKGYVEIDHALPFSRTWDDSFNNKVLVLGSENQNKGNQTPYEYFNGKENSREWQEFKARVETSRFPRSKKQRILLQKFDEDGFKERNLNDTRYVNRFLCQFVADRMRLTGKGKKRVFASNGQITNLLRGFWGLHKVRAENDRHHALDAVVVACSTIAMQQKITRFVRYKEMNAFDGKTIDKETGEVLHQKAHFPQPWEFFAQEVMIRVFGKPDGKPEFEEADTPEKLRTLLAEKLSSRPEAVHEYVTPLFVSRAPNRKMSGQGHMETVKSAKRLDEGISVLRVPLTQLKLKDLEKMVNRAREPKLYEALKARLEAHKDDPAKAFAEPFYKYDKAGNRTQQVKAVRVEQVQKTGVWVRNHNGIADNATMVRVDVFEKAGKYYLVPIYSWQVAKGILPDRAVVAYADEEDWTVIDESFRFKFVLYSNDLIKVQLKKDSFLGYFSGLDRATGAISLREHDLEKSKGKDGMHRIGVKTALSFQKYQIDEMGKEIRPCRLKKRPPVR

SEQ ID NO: 570 - protein, 1082 aa, Neisseria meningitidis
MAAFKPNPINYILGLDIGIASVGWAMVEIDEEENPIRLIDLGVRVFERAEVPKTGDSLAMARRLARSVRRLTRRRAHRLLRARRLLKREGVLQAADFDENGLIKSLPNTPWQLRAAALDRKLTPLEWSAVLLHLIKHRGYLSQRKNEGETADKELGALLKGVANNAHALQTGDFRTPAELALNKFEKESGHIRNQRGDYSHTFSRKDLQAELILLFEKQKEFGNPHVSGGLKEGIETLLMTQRPALSGDAVQKMLGHCTFEPAEPKAAKNTYTAERFIWLTKLNNLRILEQGSERPLTDTERATLMDEPYRKSKLTYAQARKLLGLEDTAFFKGLRYGKDNAEASTLMEMKAYHAISRALEKEGLKDKKSPLNLSSELQDEIGTAFSLFKTDEDITGRLKDRVQPEILEALLKHISFDKFVQISLKALRRIVPLMEQGKRYDEACAEIYGDHYGKKNTEEKIYLPPIPADKIRNPVVLRALSQARKVINGVVRRYGSPARIHIETAREVGKSFKDRKEIEKRQEENRKDREKAAAKFREYFPNFVGEPKSKDILKLRLYEQQHGKCLYSGKEINLVRLNEKGYVEIDHALPFSRTWDDSFNNKVLVLGSENQNKGNQTPYEYFNGKDNSREWQEFKARVETSRFPRSKKQRILLQKFDEDGFKECNLNDTRYVNRFLCQFVADHILLTGKGKRRVFASNGQITNLLRGFWGLRKVRAENDRHHALDAVVVACSTVAMQQKITRFVRYKEMNAFDGKTIDKETGKVLHQKTHFPQPWEFFAQEVMIRVFGKPDGKPEFEEADTPEKLRTLLAEKLSSRPEAVHEYVTPLFVSRAPNRKMSGAHKDTLRSAKRFVKHNEKISVKRVWLTEIKLADLENMVNYKNGREIELYEALKARLEAYGGNAKQAFDPKDNPFYKKGGQLVKAVRVEKTQESGVLLNKKNAYTIADNGDMVRVDVFCKVDKKGKNQYFIVPIYAWQVAENILPDIDCKGYRIDDSYTFCFSLHKYDLIAFQKDEKSKVEFAYYINCDSSNGRFYLAWHDKGSKEQQFRISTQNLVLIQKYQVNELGKEIRPCRLKKRPPVR

SEQ ID NO: 571 - protein, 1082 aa, Neisseria meningitidis
MAAFKPNPINYILGLDIGIASVGWAMVEIDEEENPIRLIDLGVRVFERAEVPKTGDSLAMARRLARSVRRLTRRRAHRLLRARRLLKREGVLQAADFDENGLIKSLPNTPWQLRAAALDRKLTPLEWSAVLLHLIKHRGYLSQRKNEGETADKELGALLKGVANNAHALQTGDFRTPAELALNKFEKESGHIRNQRGDYSHTFSRKDLQAELILLFEKQKEFGNPHVSGGLKEGIETLLMTQRPALSGDAVQKMLGHCTFEPAEPKAAKNTYTAERFIWLTKLNNLRILEQGSERPLTDTERATLMDEPYRKSKLTYAQARKLLGLEDTAFFKGLRYGKDNAEASTLMEMKAYHAISRALEKEGLKDKKSPLNLSSELQDEIGTAFSLFKTDEDITGRLKDRVQPEILEALLKHISFDKFVQISLKALRRIVPLMEQGKRYDEACAEIYGDHYGKKNTEEKIYLPPIPADEIRNPVVLRALSQARKVINGVVRRYGSPARIHIETAREVGKSFKDRKEIEKRQEENRKDREKAAAKFREYFPNFVGEPKSKDILKLRLYEQQHGKCLYSGKEINLVRLNEKGYVEIDHALPFSRTWDDSFNNKVLVLGSENQNKGNQTPYEYFNGKDNSREWQEFKARVETSRFPRSKKQRILLQKFDEDGFKECNLNDTRYVNRFLCQFVADHILLTGKGKRRVFASNGQITNLLRGFWGLRKVRAENDRHHALDAVVVACSTVAMQQKITRFVRYKEMNAFDGKTIDKETGKVLHQKTHFPQPWEFFAQEVMIRVFGKPDGKPEFEEADTPEKLRTLLAEKLSSRPEAVHEYVTPLFVSRAPNRKMSGAHKDTLRSAKRFVKHNEKISVKRVWLTEIKLADLENMVNYKNGREIELYEALKARLEAYGGNAKQAFDPKDNPFYKKGGQLVKAVRVEKTQESGVLLNKKNAYTIADNGDMVRVDVFCKVDKKGKNQYFIVPIYAWQVAENILPDIDCKGYRIDDSYTFCFSLHKYDLIAFQKDEKSKVEFAYYINCDSSNGRFYLAWHDKGSKEQQFRISTQNLVLIQKYQVNELGKEIRPCRLKKRPPVR

SEQ ID NO: 572 - protein, 1082 aa, Neisseria meningitidis
MAAFKPNPINYILGLDIGIASVGWAMVEIDEEENPIRLIDLGVRVFERAEVPKTGDSLAMARRLARSVRRLTRRRAHRLLRTRRLLKREGVLQAANFDENGLIKSLPNTLWQLRAAALDRKLTPLEWSAVLLHLIKHRGYLSQRKNEGETADKELGALLKGVAGNAHALQTGDFRTPAELALNKFEKESGHIRNQRGDYSHTFSRKDLQAELNLLFEKQKEFGNPHISDGLKEGIETLLMTQRPALSGDAVQKMLGHCTFEPTEPKAAKNTYTTERFIWLTKLNNLRILEQGSERPLTDTERATLMDEPYRKSKLTYAQARKLLELDDIAFFKGLRYGKDNAEASTLMEMKAYHAISRALEKEGLKDKKSPLNLSPELQDEIGTAFSLFKTDEDITGRLKDRIQPEILEALLKHINFDKFVQISLKALRRIVPLMEQGKRYDEACAEIYGDHYGKKNTEEKIDLPPIPADEIHNPVVLRALSQARKVINGVVRRYGSPARIHIETAREVGKSFKDRKEIEKRQEENRKDREKAAAKFREYFPNFVGEPKSKDILKLRLYEQQHGKCLYSGKEINLGRLNEKGYVEIDHALPFSRTWDDSFNNKVLVLGSENQNKGNQTPYEYFNGKDNSREWQEFKARVETSRFPRSKKQRILLQKFDEDGFKERNLNDTRYVNRFLCQFVADRMRLTGKGKKRVFASNGQITNLLRGFWGLRKVRAENDRHHALDAVVVACSTVAMQQKITRFVRYKEMNAFDGKTIDKETGEVLHQKTHFPQPWEFFAQEVMIRVFGKPDGKPEFEEADTPEKLRTLLTEKLSSRPEAVHEYVTPLFVSRAPNRKMSGQGHMETVKSAKRLDEGISVLRVPLTQLKLKDLEKMVNREREPKLYEALKARLEAHKDDPAKAFAEPFYKYDKAGNRTQQVKAMRVEQVQKTGVWVRNHNGIADNATMVRVDVFEKGDKYYLVPIYSWQVAKGILPDRAVVQGKDEEDWQLIDDSFNFKFSLHPNDLVEVITKKARMFGYFASCHRGTGNINIRIHDLDHKIGKNGILEGIGVKTALSFQKYQIDELGKEIRPCRLKKRPPVR

SEQ ID NO: 573 - protein, 1082 aa, Neisseria meningitidis
MAAFKPNPINYILGLDIGIASVGWAMVEIDEEENPIRLIDLSVRVFERAEVPKTGDSLAMARRLARSVRRLTRRRAHRLLRARRLLKREGVLQAADFDENGLIKSLPNTPWQLRAAALDRKLTPLEWSAVLLHLIKHRGYLSQRKNEGETADKELGALLKGVADNAHALQTGDFRTPAELALNKFEKESGHIRNQRGDYSHTFSRKDLQAELILLFEKQKEFGNPHVSGGLKEGIETLLMTQRPALSGDAVQKMLGHCTFEPAEPKAAKNTYTAERFVWLTKLNNLRILEQGSERPLTDTERATLMDEPYRKSKLTYAQARKLLGLEDTAFFKGLRYGKDNAEASTLMEMKAYHAISRALEKEGLKDKKSPLRLSPELQDEIGTAFSLFKTDEDITGRLKDRVQPEILEALLKHISFDKFVQISLKALRRIVPLMEQGKRYDEACAEIYGDHYGKKNAEEKIYLPPIPADEIRNPVVLRALSQARKVINGVVRRYGSPARIHIETAREVGKSFKDRKEIEKRQEENRKDREKAAAKFREYFPNFVGEPKSKDILKLRLYEQQHGKCLYSGKEINLGRLNEKGYVEIDHALPFSRTWDDSFNNKVLVLGSENQNKGNQTPYEYFNGKDNSREWQEFKARVETSRFPRSKKQRILLQKFDEDGFKERNLNDTRYVNRFLCQFVADRMRLTGKGKKRVFASNGQITNLLRGFWGLRKVRAENDRHHALDAVVVACSTVAMQQKITRFVRYKEMNAFDGKTIDKETGEVLHQKTHFPQPWEFFAQEVMIRVFGKPDGKPEFEEADTPEKLRTLLAEKLSSRPEAVHEYVTPLFVSRAPNRKMSGQGHMETVKSAKRLDEGVSVLRVPLTQLKLKDLEKMVNREREPKLYEALKARLEAHKDDPAKAFAEPFYKYDKAGNRTQQVKAVRVEQVQKTGVWVRNHNGIADNATMVRVDVFEKGDKYYLVPIYSWQVAKGILPDRAVVQGKDEEDWQLIDDSFNFKFSLHPNDLVEVITKKARMFGYFASCHRGTGNINIRIHDLDHKIGKNGILEGIGVKTALSFQKYQIDELGKEIRPCRLKKRPPVR

SEQ ID NO: 574 - protein, 1082 aa, Neisseria meningitidis
MAAFKPNSINYILGLDIGIASVGWAMVEIDEEENPIRLIDLGVRVFERAEVPKTGDSLAMARRLARSVRRLTRRRAHRLLRTRRLLKREGVLQAANFDENGLIKSLPNTPWQLRAAALDRKLTPLEWSAVLLHLIKHRGYLSQRKNEGETADKELGALLKGVAGNAHALQTGDFRTPAELALNKFEKESGHIRNQRSDYSHTFSRKDLQAELILLFEKQKEFGNPHVSGGLKEGIETLLMTQRPALSGDAVQKMLGHCTFEPAEPKAAKNTYTAERFIWLTKLNNLRILEQGSERPLTDTERATLMDEPYRKSKLTYAQARKLLGLEDTAFFKGLRYGKDNAEASTLMEMKAYHAISRALEKEGLKDKKSPLNLSPELQDEIGTAFSLFKTDEDITGRLKDRIQPEILEALLKHISFDKFVQISLKALRRIVPLMEQGKRYDEACAEIYGDHYGKKNTEEKIYLPPIPADEIRNPVVLRALSQARKVINGVVRRYGSPARIHIETAREVGKSFKDRKEIEKRQEENRKDREKAAAKFREYFPNFVGEPKSKDILKLRLYEQQHGKCLYSGKEINLGRLNEKGYVEIDHALPFSRTWDDSFNNKVLVLGSENQNKGNQTPYEYFNGKDNSREWQEFKARVETSRFPRSKKQRILLQKFDEDGFKERNLNDTRYVNRFLCQFVADRMRLTGKGKKRVFASNGQITNLLRGFWGLRKVRAENDRHHALDAVVVACSTVAMQQKITRFVRYKEMNAFDGKTIDKETGEVLHQKTHFPQPWEFFAQEVMIRVFGKPDGKPEFEEADTLEKLRTLLAEKLSSRPEAVHEYVTPLFVSRAPNRKMSGQGHMETVKSAKRLDEGVSVLRVPLTQLKLKDLEKMVNREREPKLYEALKARLEAHKDDPAKAFAEPFYKYDKAGNRTQQVKAVRVEQVQKTGVWVRNHNGIADNATMVRVDVFEKGDKYYLVPIYSWQVAKGILPDRAVVQGKDEEDWQLIDDSFNFKFSLHPNDLVEVITKKARMFGYFASCHRGTGNINIRIHDLDHKIGKNGILEGIGVKTALSFQKYQIDELGKEIRPCRLKKRPPVR

SEQ ID NO: 575 - protein, 67 aa, Neisseria meningitidis
MFGYFASCHRGTGNINIRIHDLDHKIGKNGILEGIGVKTALSFQKYQIDELGKEIRPCRLKKRPPVR

SEQ ID NO: 576 - protein, 220 aa, Neisseria mucosa
MRHIFSDGLKEGIETLLMTQRPALSGDAVQKMLGHCTFEPTEPKAAKNTYTAERFIWLTKLNNLRILEQGSERPLTNTERATLMDEPYRKSKLTYAQARKLLGLKDTAFFKGLRYGKDNAEASTLMEMKAYHAISRALEKEGLKDKKSPLNLSPELQDEIGTAFSLFKTDEDITGRLKTELTPASNKTLSRPFTVKSASNGSTSAPWLPSTKWFLHFKPA

SEQ ID NO: 577 - protein, 392 aa, Neisseria sp.
MAPFTLKPLNYILGLDIGIASVGWAVVETDSDVLPYRLIDVGVRTFDRAEVPKTGESPAAARRLARSVRRMIRRRAHRMLRARRLLKREGMLQAADFDAHGLVENLPVNPWQLRVDALSRKLMPLEWAAVLLHMVKHRGYLSQRKNERNSSDKELGALLSGVAANSEALQGGDFRTPAELAVNKFEKESGHIRNQRGDYSHTFNRKDVQAELVLLFEKQKEYGNPYISDGLLTGVEDLLMTQRAALSGDAVQKMLGRCTFEPEEYKAAKNTYSAERFVWLTKLNNLRILDQGSERPLTDSERAKLMDEPYKKTKLTYAQVRRLLELDDTAFFKGLRYSKDNAESATLMEMKAYHSISGALEKAGLKNKKIAAGLIARIAGRNRRGVFAIQNR

SEQ ID NO: 578 - protein, 701 aa, Neisseria sp.
MQDEIGEAFSLFKTDEDIRGRLKGKLPDEQLDALLEYVSFDKFVQLSLKALRKILPLMEQGKRYDEACAEIYGDHYGIKDDKQAQFLPPVSADEIRNPVVLRALSQARKVVNAVVRRYGSPARVHIETAREVGKSFLDRKKIEKRQEENRKDRERSIAKFREYFPNFVGEPKAKDILKMRLYEQQQGQCLYSGKAIDLRRLNEKGYVEIDHALPFSRTWDDSFNNKVLVLAGENQNKRNQTPFEWLGGDEKRWREFTARVEHCRFPRSKKQRILMQKLDEKDFKERNLNDTRYVNRFLCNFIAQNMLLTGEDKNRVFASNGQITNLLRGMWGLKKVRESNDRHHALDAVVVACSTVAMQQKITNYVRQKEMNVFDGEMVDKTTGEVSRLHFPQPWDFFRQEVMMRVFGKPDTPSENNEEADTPEKLRALLADKLSSRPEAVHEAVTPLFVSRAPSRKMSGQGHMETIKSAKRLSEGKSVLRVPLTQLTPKLLENMVNREREPQLYEDLLGRLNAHGGDPAKAFAAPFFKRDKAGNPTQQVKAVRVEDVQKSGVIVREGNGVADNATMVRVDVFEKGGKYYLMPIYTWQAAKGILPNKAVIAHTDEANWQEMDTSFTFKFALYPNDLVLASLKKETYFGYFAGLDRSTGNISLRVHDLEKSKGKDGVYRIGVKTALSFQKYQVDELGKTIRPCRLKKRPPVR

SEQ ID NO: 579 - protein, 1089 aa, Neisseria sp.
MTAFKPNPLNYILGLDIGIASVGWAMVEIDDKENPVRLIDLGVRVFERAEMPKTGDSLAAARRLARSVRRLTRRRAHRLLRARRLLKHEGVLKPEDFDENGLVKPLPYIPKQPRNTPWQLRAAALDRKLTPLEWAAVLLHLVKHRGYLSQRKNEGETDDKELGALLKGVADNTHALQAGNFRTPAELALNKFEKESGHIRNQRGDYSHTFSRKDLQAELVLLFEKQKEFGNPYVSDDLKNGIENLLMTQRPALSGDAIQKMLGHCTFEPAEPKAAKNTYTAERFIWLTKLNNLRILNQGNERPLTDAERTTLMDEPYKKSKLTYAQARKLLDLDDTAFFKGLRYGKDNAESATLMEMKAYHAISRALEKEGLKDKKSPLSLSPELQDEIGTAFSLFKTDEEITGRLKGCLQPEILDALLKHISFDKFVQISLKALRRIVPLMEQGKRYDEACAEIYGDHHGRRNSEETLYLPPIPADEIRNPVVLRALSQARKVINGVGRRYGSPARIHIETAREVGKSFKDRKEIEKRQEENRKDREKAAAEFQEYFPNFVGEPKSKDILKLRLYRQQNCKCLYSGKEINLGRLNEKGYVEIDHALPFSRTWDDSFNNKVLVLGSENQNKGNRTPYEYLNGKDNSREWQEFKARVETSRFPHSKKQRILLQKFDEEGFKERNLNDTRYVNRFLCKFVADHMQLTGKGKRRVFASNGQITNLLRGFWGLRKVRAENDRHHALDAVVVACSTVAMQQRITRFVRYKEMNAFDGKTVDKETGEVLHQKTHFPQPWEFFAQEVMIRVFGKPDGKPELEEADTPEKLRALLAEKLSSRPEAVHEYVAPLFVSRAPNRKMSGQGHMETIKSPKRLDEGISVVRVPLTQLKLKDLEKMVNREREPKLYEALKARLEAHKDDPAKAFAEPFYKQDKAGNRTQQVKAVRIEQVQKTGVWVRNQNGIADNATMVRVDVFEKGGKYYLVPIYSWQVAKGILPDKAIIAFKDEEEWQLIDDSFNFKFPLHPNDLVEVITKKARIFGYFASCHRGTGNINIRIHDLDNKVGKNGILEGIGVKTALSFQKYQIDELGKEIRPCRLKKRPPVR

SEQ ID NO: 580 - protein, 1097 aa, Neisseria wadsworthii
MKKQPQRYILGLDLGIASVGWALILVDGAENPVGLLDCGVRTFERAEVPKTGDSLALARRQARSVRRLIRRRAHRLLRLRRLLKREGILSAADFNSDGLPNLPIDAWQLRVAGLERKLTNQEWAAVLLHLVKHRGYLSQRKSETQTENKELGRLLAGVAENSKLLSESSEQYRTPAELAVKLFAEQSGHLRNKGGEYTHTFNRLDLQKELHLLFERQYALGNPFASAELQSKVDELLMTQRSALQGEAVLKMLGKCTFEPSEYKAAKNTYSAERFIWLTKLNNLRILYNGEERALDEGDRKKLLDEPYKKAKLTYKQVRSILNLPESAVFKGLRYGKDSDGLKAENGTLMEMKAYHKIRTILDKAGLKGEWENRIRNPEILDKIGTAFSLYKTDEDIQAALADLRLPENVLDALLAGLNFDKFIQLSLKALRNILPLMERGIRYDEACKEVYGDHRALAESKNQVLLPPIPADEIRNPVVLRTLTQARKVINAIIRRYGSPQRVHIETARELGKSKQERDKIDRKNKENQNDRNRLASDIRKHFNFEPTPKDILKLRLYEQQHGKCLYSDLREEKGECLYTGNVIELHRLFEDGYVEIDHALPLSRTWDNSLNNKVLVLKSSNQNKGNKTPYEWLDGANNSRRWREFQARVQGCHFPYVKKQRIQTAKLDSKAEQGFLERNLNDTRYISKFMCQFITANLRLAETSNALMEEVAGENPYWKERKRQRVFAPSGSIIALLRGLWGLKKVREDNDRHHALDAIVVACSTVSMQQKITKAMQRRETLETVDSETGEVKTRIPQPWDFFRQEVMIRVFSDSPREELAEKLNSRPEALHDFVSPLFVSRAPNRKMTGQGHLETVKSAKRLSENISVVRKPLTALKLKDIENIVGYPDREPALYQALRERLLAHKDDPVKAFADKPFYKPAKDGGQGSLVKAVRIIENTKHGLKIRNGITDTNGDMVRTDVYQKTDKKGKRQYFIVPVYAWQVEKNELPTVDCKGYEIDDNYEFCFSLYKYDLIEIQNPNDINQELRAYYINCDSSDGRFWLAYHDKSAKEQQFRISTQNQPIIKKYQVDTLGKEIRLCKAEKRTALNGKKKK

SEQ ID NO: 581 - protein, 1426 aa, Niabella soli
MPRKNILGLDLGTTSIGFAKIIEDDDYQCSSVELIGVRVNPLTTDEQTNFEKGKPVSVNADRTLKRGMRRNLDRYQLRRDYLIEILRTHHIITADTKLAEDGKNTTHTTYALRALAATAEIPLEAFVRVLLAINKKRGYKSSRKAKNEDEGQLIDGMAIARRLYEESLTPGQFSYQLLKEGKKYLPDFYRSDLNTELNKVWNFQKQFYPEILTDEFKRHLEGKGQRATAVAFWGQHGFSMAENKGSREEKKLHAYKWRSEAAHKQLTKEEVAFVITEINNDLNKSSGYLGAISDRSKELFFNKQTVGQYLHQQLKENPHTRLKGQVFYRQDYLDEFETIWEMQAKFYSALTLELKEEVRDVVIFYQRKLKSQMGLISLCEFESKEIEIEKNGEKAKKRIGLRVAPKSSPLFQEFKIWQVLNNLEFRNKKTKEVFVPEMAAKQQLFDELNIKGNLLASEAIKILGYKTKDWEANYHTLEGNRTNKSLYDAWLKILELEGYDENLLKLSGSDDIDVSKIEKPALEIRQMVLAVFEVLGISGAILDFDAEADGKAFEQQPAYQLWHLLYSAEDDGKKYSQEDIFTYGHDNIGLKKKLCEKFGFRPEHTKILVNVVFSDDYGNLSSKAMRRIYPFIKELTYDKACAEAGYRHSAASLTKEEIAARPLQNRLDLLKKNELRSPVVEKILNQMVNVVNTLVDDENQNRKARGLSEDFHFDEIRIELARELKKNAKERAEMTTNINTAKQSHEKIIRILQTEFGVPNPSRNDIVRYKLYEELKNNGYKDLYTNTYISRDILFSKQIDVDHIIPQMSLFDDSFSNKTVVFRKDNQDKGNKTAYDYILGKYGEQALEEYISRITSLFELGKKNKEEGIGKAKFQKLQKRLVDIGDGFIERDLRESQYIAKKANNMLYAICRSVVSTSGEITARLREDWDLVNVMQEINLPKFRALGLTEMVEKKDGAQKERITDWTKRNDHRHHAMDALAIAFTRHSHIQYLNHLNARKDEANKWHPVVSKIEEKETVLIYDDLGNRKRKFKAPMPNFREVVKEHLENVLISHKAKNKVVTKNKNKIKTVRGEKVKTELTPRGQLHKETIYGRYRYYESKEEKIGPKFDAEMIGMVTNPQYKKLLLERLAANGNDPKKAFWGKNALNKNPLYVDEARQELLPEKILLRWLNDDYSIRKDVTPENLKDIKTIEKILDKGVKKILLKRLADFGNDPKKAFSDLDKNPIWQNEAKRIAIKRVTISGIKNAAPLHHKKDHLGNDILDEKGKQIPSSFVSTGNNHHVAIYRDAEGNLQERVVSLFDAVQLVNGGEPVIDKEYNKGIGWQFLFTMKQNEMFVFPDEKTGFNPREVDLLSSGNRKLISPNLFRVQKLASKNYFFRHHLETSVEEKKELKNIAYKPQLGLNALSNIVKVRINHIGEIVSVGEY

SEQ ID NO: 582 - protein, 79 aa, Nitritalea halalkaliphila
MPLRLPERVYKMISSTGAECHFLPVNVSSLIKGYDAKSKLGEFGSQNKQEVTSDSFIRVKERCYKLEINRLGIPLNRLK

SEQ ID NO: 583 - protein, 1498 aa, Odoribacter laneus
METTLGIDLGTNSIGLALVDQEEHQILYSGVRIFPEGINKDTIGLGEKEESRNATRRAKRQMRRQYFRKKLRKAKLLELLIAYDMCPLKPEDVRRWKNWDKQQKSTVRQFPDTPAFREWLKQNPYELRKQAVTEDVTRPELGRILYQMIQRRGFLSSRKGKEEGKIFTGKDRMVGIDETRKNLQKQTLGAYLYDIAPKNGEKYRFRTERVRARYTLRDMYIREFEIIWQRQAGHLGLAHEQATRKKNIFLEGSATNVRNSKLITHLQAKYGRGHVLIEDTRITVTFQLPLKEVLGGKIEIEEEQLKFKSNESVLFWQRPLRSQKSLLSKCVFEGRNFYDPVHQKWIIAGPTPAPLSHPEFEEFRAYQFINNIIYGKNEHLTAIQREAVFELMCTESKDFNFEKIPKHLKLFEKFNFDDTTKVPACTTISQLRKLFPHPVWEEKREEIWHCFYFYDDNTLLFEKLQKDYALQTNDLEKIKKIRLSESYGNVSLKAIRRINPYLKKGYAYSTAVLLGGIRNSFGKRFEYFKEYEPEIEKAVCRILKEKNAEGEVIRKIKDYLVHNRFGFAKNDRAFQKLYHHSQAITTQAQKERLPETGNLRNPIVQQGLNELRRTVNKLLATCREKYGPSFKFDHIHVEMGRELRSSKTEREKQSRQIRENEKKNEAAKVKLAEYGLKAYRDNIQKYLLYKEIEEKGGTVCCPYTGKTLNISHTLGSDNSVQIEHIIPYSISLDDSLANKTLCDATFNREKGELTPYDFYQKDPSPEKWGASSWEEIEDRAFRLLPYAKAQRFIRRKPQESNEFISRQLNDTRYISKKAVEYLSAICSDVKAFPGQLTAELRHLWGLNNILQSAPDITFPLPVSATENHREYYVITNEQNEVIRLFPKQGETPRTEKGELLLTGEVERKVFRCKGMQEFQTDVSDGKYWRRIKLSSSVTWSPLFAPKPISADGQIVLKGRIEKGVFVCNQLKQKLKTGLPDGSYWISLPVISQTFKEGESVNNSKLTSQQVQLFGRVREGIFRCHNYQCPASGADGNFWCTLDTDTAQPAFTPIKNAPPGVGGGQIILTGDVDDKGIFHADDDLHYELPASLPKGKYYGIFTVESCDPTLIPIELSAPKTSKGENLIEGNIWVDEHTGEVRFDPKKNREDQRHHAIDAIVIALSSQSLFQRLSTYNARRENKKRGLDSTEHFPSPWPGFAQDVRQSVVPLLVSYKQNPKTLCKISKTLYKDGKKIHSCGNAVRGQLHKETVYGQRTAPGATEKSYHIRKDIRELKTSKHIGKVVDITIRQMLLKHLQENYHIDITQEFNIPSNAFFKEGVYRIFLPNKHGEPVPIKKIRMKEELGNAERLKDNINQYVNPRNNHHVMIYQDADGNLKEEIVSFWSVIERQNQGQPIYQLPREGRNIVSILQINDTFLIGLKEEEPEVYRNDLSTLSKHLYRVQKLSGMYYTFRHHLASTLNNEREEFRIQSLEAWKRANPVKVQIDEIGRITFLNGPLC

SEQ ID NO: 584 - protein, 1389 aa, Oenococcus kitaharae; identical to SEQ ID NO: 241

SEQ ID NO: 585 - protein, 1535 aa, Ornithobacterium rhinotracheale
MNTILGLDLGTNSIGWALIKVLNDKTRLPLEIIDLGVVVIPTDQRTLDKFSKGESISKTAERTKQKGVRKLYERKKLRRERLHRVLNILGFLPEHYSKKIDFKKHLGQFFGNSQPKISYVENDHGKHEFIFMDSYREMLKEFSKHNIKNVPYDWTIYYLRKKALSQKISKEELAWVILNFNKKRGYYQFRDDNADENKENKIEKYYALKVTNVKKEDAQNYTITLENGWIYKNKSKISLLDWVGSTKEFISTEKFDNKGNIIKKKNGEDDRTLKLVDSEKDWIAIKKSTEDRIENYGKTVGTYLYEHLLKDPNQKLNGELINIIDRKFYKNELKQILEKQKEFHPELLNEDLFQKSIIELYPKNSTRQKELKNKDLCYLLIDDVIYYQRDLKKKNSTINKCSFESREYYLNGEKQIQKINCIAKSKPLYQEFRTLQFIKNLKVYEIIDGLEKDITSKLLPDFETKEHFFEWLNDKEKIDQLQLLSYKCFDLHDNVKNDLIAKGIKRPTEKAIRTELLEKYRWNYSKDNDRNFLLNETRFKILKYLKKVDKKLTLTNEQIESLWLLLYSAKDERELKNGLQKFSEKNKLPKKFSDIFISFPPFKKEYGAYSEKALKKLLSLVRFGKYWSFNKIDNNIQNKIMNILNGEVDDSISDRVREKTILLQDKNDFQDLPLWLASYVAYNRFSEVSEIKYWDSPDKIEFLKQHSIGNPIVEKIINETLKLIKDIWVIHGKSCKNFFSEIHIELSREIKSSSKKRAQITNNNTKNQKLNNLIKSLLIEMASDTKYENVTPYSPSQQEILKIYDEGIYSKEENSEKIKEINKIRNNNKISKSDITKYKLWLEQGYISPYTGKIIPLTKLFTAKYQKEHIIPQTKFFDDSFNNKVICEAEVNKLKDNSLAMNFIKAKGGKAVKLSDGETVTILNQEEYKQLVRTSFKKNSIKLRNLLLEEIPDTFTKRQLNDTKYISKLVLSLLSNIVREKGELESTAKRIVSTNGQITSILRNDWGLNNIWNKLITPRFERLNNINKNKIYGNWENKKGKNVFQINYLNDNLSTLNTKRIDHRHHALDALIVACTTRNHINFLNNQYAKSRNQRHDLRAKLKRRETITTEGSKKQVFKDFIKPWESFTQDALKKLETTIVNFKVNKRIINKTINWYKKWEKQKDGTYKKIQKKQTKGDAWAIRKPLHIDTIYGIVCKKLPLKSALENYKNIIDENLKHKIKELKEVNKFDNNQIINFFKECNFIFEDNNIQKVEVYDFKDNRDKTILSSSRQLIDESFTPKKIGKVLDPTIRNILLKHLNSTKYNNKFDSDGNPIKPEKLAFSPEGLKDLNKNIKHLNNNKEHQPIKRVKLFETLGNKIKVGYTQQKNKKFAETATGTNLFLGIYSDNNKRDFKTIPLILAIQREKEGLNPCPDTDEKGNQLLFSLSPNELVFVPNNEERKNPNLVDFENLSKDQIDRIYKFVSCTGSEAYFVPSRTAKPIIENENGTNNKSQRIIEFNEKTSIKNEKNEPVLIKTICWKIEVNRLGKIIKVIK

SEQ ID NO: 586 - protein, 103 aa, Parabacteroides merdae
MIVYRLFYRFLFKATKLVNFVIHKELKRQIARTGKIKFHSGGCGCQSGNYKMQNFEKGKSITTNADRTLKRSMRRNLYRCKLRRDVLIELLKKVGFIPEKQWK

SEQ ID NO: 587 - protein, 82 aa, Parabacteroides merdae
MSIWKLQYPPLDLKIYNKFLVYSRVNPLTVDEMQNFEKGKSITTNADRTLKRSMRRNLQRYKLRRDVLIELLKKVGFMSEKQ

SEQ ID NO: 588 - protein, 84 aa, Parabacteroides merdae
MSIWKLQYPPLDLKIYNKFLVYSRVNPLTVDEMQNFEKGKSITTNADRTLKRSMRRNLYRCKLRRDVLIELLKKVGFIPEKQWK

SEQ ID NO: 589 - protein, 398 aa, Pasteurella bettyae
MLANENQNKGNLTPYEWLDGKNNSKRWQDFVARVQTCCFSHRKKQHILSHKLDEKSFIERNLNDTRYVARFLCNFIADNMLLTGKGKRKVFASNGQITALLRGRWGLQKVRDDNDRHHALDAVVIACSTVAMQQKITRFVKYEEGNVFSGERIDRETGEIIPLYFPTPWKFFKENVEIRIFSENPKLELENRLPDYPQYNHEFVQPLFVSRMPTRKMTGQGHMETIKSAKRLDEGISVLKVPLTQLKLADLENMVNRERELALYEALKERLELFGNDPAKAFIEPFYKKGGALVKAVRVKKVQKSGVLVRDGNGVADNALMVRVDVFTKGGKYFLVPIYTWQVAKGILPNKAVTANIDEIDWLEMDESYQFIFTMYPNDLVKVKLKKEEFFGYYGGLD

SEQ ID NO: 590 - protein, 610 aa, Pasteurella bettyae
MNMLKPLNYILGLDLGIGSVGWAVVEIDEQGNPLRLIDVGVRTFERAEVAKTGESLALARRLARSSRRLVKRRAARIKKAKRLLKAENILLSVDEILPNDVWQLRVKGLDHKLERQEWAAVLLHLLKRRGYLSQRKNESKSENKELGALLSGVVTNHQILQTDEYRTPAEIAVHKFQAEDGHIRNQRGDYTHTFSRLDLLAEMELLFQRQTELGNLHTSSKLLENLTALLMWQKPALAGEAILKMLGKCTFEPTEYKAAKNSYSAERFVWLTKLNNLRILEQGAERALTDSERFVLLDQPYEKAKLTYAQVRTLLKLSDEAIFKGVRYQGEDKKTVESKTTLMEMKAYHQIRKALDGADLKDEWNTLKNDSALLDEIGTAFSLYKTDDDISHYLGGKLSEKVLNVLLENLNFDKFIQLSLKALQKILPLMLQGQRYDEAVSAVYGDHYGKKSAESCRLLPAIPANEIHNPVVLRTLTQARKVINAVVRLYGSPARIHIETGRKVGKSYQDRKKLEKQQEENREQRESAVKKFKEYFPNFVGEPKGKDILKLRLYELQQSKCLYSGKSFDPNRLLEKGYVEVDHALPFSRTWDDSFNNKVCLPMKTRIKAI

SEQ ID NO: 591 - protein, 199 aa, Pasteurella multocida
MACATPSMQQKITRFIRFKEVHPYKIENRYEMVDQESGEIISPHFPEPWAYFRQEVNIRVFDNHPDTVLKEMLPDRPQANHQFVQPLFVSRAPTRKMSGQGHMETIKSAKRLAEGISVLRIPLTQLKPNLLENMVNKEREPALYAGLKARLAEFNQDPAKAFTTPFYKQGGQQVKAIRVEQVQKSGVLVRENNGVADNA

SEQ ID NO: 592 - protein, 63 aa, Pasteurella multocida
MQTTNLSYILGLDLGIASVGWAVVEINENEDPIGLIDVGVRIFERAEVPKTGESLALSRRLAR

SEQ ID NO: 593 - protein, 1058 aa, Pasteurella multocida
MQTTNLSYILGLDLGIASVGWAVVEINENEDPIGLIDVGVRIFERAEVPKTGESLALSRRLARSTRRLIRRRAHRLLLAKRFLKREGILSTTDLEKGLPNQAWELRVAGLERRLSAIEWGAVLLHLIKHRGYLSKRKNESQTNNKELGALLSGVAQNHQLLQSDDYRTPAELALKKFAKEEGHIRNQRGAYTHTFNRLDLLAELNLLFAQQHQFGNPHCKEHIQQYMTELLMWQKPALSGEAILKMLGKCTHEKNEFKAAKHTYSAERFVWLTKLNNLRILEDGAERALNEEERQLLINHPYEKSKLTYAQVRKLLGLSEQAIFKHLRYSKESAESATFMELKAWHAIRKALENQGLKDTWQDLAKKPDLLDEIGTAFSLYKTDEDIQQYLEGKLPDSVINALLVSLNFDKFIELSLKSLRKILPLMEQGKRYDQACHEIYGHHYGEKNQQISQLLPVIPTQEIRNPVVLRTLSQARKVINAIIRQYGSPARVHIETGRELGKSFKERREIQKQQEDNRTKRESAVQKFKELFSDFSSEPKSKDILKFRLYEQQHGKCLYSGKEINIHRLNEKGYVEIDHALPFSRTWDDSFNNKVLVLASENQNKGNQTPYEWLQGKINSERWKNFVALVLGSQCSAAKKQRLLTQVIDDNKFIDRNLNDTRYIARFLSNYIQENLLLVGKNKKNVFTPNGQITALLRSRWGLIKVRENNDRHHALDAIVVACATPSMQQKITRFIRFKEVHPYKIENRYEMVDQESGEIISPHFPEPWAYFRQEVNIRVFDNHPDTVLKEMLPDRPQANHQFVQPLFVSRAPTRKMSGQGHMETIKSAKRLAEGISVLRIPLTQLKPNLLENMVNKEREPALYVGLKARLAEFNQDPAKAFATPFYKQGGQQVKAIRVELVQKSGVLVRQGNGVADNAPGSIVRTDVFIKNNKFFLVPIYTWQVAKGILPNKAIVAHKNEDEWEEMDEGAKFKFSIFPNDLIELRTKTECFLGYYIGPDRHNGSISLREHDSEISKGNAGVYRVGVKLALSLEKYHIDELGKNRRICRPHQRRPVR

SEQ ID NO: 594 - protein, 1056 aa, Pasteurella multocida
MQTTNLSYILGLDLGIASVGWAVVEINENEDPIGLIDVGVRIFERAEVPKTGESLALSRRLARSTRRLIRRRARRLLLAKRFLKREGILSTTDLEKGLPNQAWELRVAGLERRLSAIEWGAVLLHLIKHRGYLSKRKNESQTNNKELGALLSGVAQNHQLLQSDDYRTPAELALKKFAKEEGHIRNQRGAYTHTFNRLDLLAELNLLFAQQHQFGNPHCKEHIQQYMTELLMWQKPALSGEAILKMLGKCTHEKNEFKAAKHTYSAERFVWLTKLNNLRILEDGAERALNEEERQLLINHPYEKSKLTYAQVRKLLGLSEQAIFKHLRYSKENAESATFMELKAWHAIRKALENQGLKDTWQDLAKKPDLLDEIGTAFSLYKTDEDIQQYLTNKVPNSVINALLVFLNFDKFIELALKSLRKILPLMEQGKRYDQACREIYGHHYGEANQKTSQLLPAIPAQEIRNPVVLRTLSQARKVINAIIRQYGSPARVHIETGRELGKSFKERREIQKQQEDNRTKRESAVQKFKELFSDFSSEPKSKDILKFRLYEQQHGKCLYSGKEINIHRLNEKGYVEIDHALPFSRTWDDSFNNKVLVLASENQNKGNQTPYEWLQGKINSERWKNFVALVLGSQCSAAKKQRLLTQVIDDNKFIDRNLNDTRYIARFLSNYIQENLLLVGKNKKNVFTPNGQITALLRSRWGLIKIRENNDRHHALDAIVVACATPSMQQKITRFIRFKEVHPYKIENRYEMVDQESGEIISPHFPEPWAYFRQEVNIRVFDNHPDTVLKEMLPDRPQANHQFVQPLFVSRAPTRKMSGQGHMETIKSAKRLAEGISVLRIPLTQLKPNLLENMVNKEREPALYAGLKARLAEFNQDPAKAFTTPFYKQGGQQVKAIRVEQVQKSGVLVRENNGVADNASIVRTDVFIKNNKFFLVPIYTWQVAKGILPNKAIVAHKNEDEWEEMDEGAKFKFSLFPNDLVELKTKKEYFFGYYIGLDRATGNISLKEHDGEISKGKDGVYRVGVKLALSFEKYQVDELGKNRQICRPQQRQPVR

SEQ ID NO: 595 - protein, 134 aa, Pasteurella multocida
MVNKEREPALYAGLKARLAEFNQDPAKAFTTPFYKQGGQQVKAIRVEQVQKSGVLVRENNGVADNASIVRTDVFIKNNKFFLVPIYTWQVAKGILPNKAIVAHKNEDEWEEMDEGAKFKFSLFPNDLVELKTKK

SEQ ID NO: 596 - protein, 53 aa, Pasteurella multocida
YSKENAESATFMELKAWHAIRKALENQGLKDTWQDLAKKPDLLDEIGTAFSLL

SEQ ID NO: 597 - protein, 1366 aa, Pediococcus acidilactici
MGDRKYNLGLDIGTSSIGFAAVDENNQPIRVKGKTAIGVRLFEEGKTAADRRGFRTTRRRLSRRRWRINLLNEIFDAHLAEVDPTFLARLKESNRSNLDPKKSFQGSLLFPERKDYQFYEEYPTIYHLRKALMEEDRKFDIREIYLAVHHIIKYRGNFLNGTPMRSFKVENIELDTLFDQLNQLYAEIVPDNELAFDLAQVADVKDVLSSTTIYKMDKKKQLVKMMLLPASNKALQSENKKIVTQFVNAILNYKFKLDVLLQVETDADWSLKLNDEGADDKLEEFTGDLDENRLEIIDLLQRLHNWFSLNEITKDGNSLSAAMVEKYENHHHHLGLLKKVIENHPDAKKAKALKETYTAYVGKTDDKTQNQDDFYKAVEKNLDDSPDAKEIKRLIQLDQFMPKQRTGQNGAIPHQLHQQELDQIIEKQSKYYPFLAEPNPNVKRRKDAPYKLDELIAFKIPYYVGPLVTPEEQAQNKENVFAWMKRKAAGPITPWNFDEKVDRMESANRFIRRMTTKDTYLFGEDVLPAESMIYQKFVVLNELNNLKINGRHLSLKDKQDVYNDLFKQQKTVSIKALQNYYVTKKKAATAPTVGGLADPKKFLSSLSTYIDFKNMFGERVNDPQFQEDLEQIVEWSTIFEDRGIFKAKLQALGWLSEKQIQQLVAKRYKGWGRLSKKLLTGLKNAEGYSILDEMWRSTENFMQIQTRPEFAALIQQANEKQFEGNDPNNVWENIESILGDAYTSPQNKKAIRQVVKVVQDIEKAVGNPPEKIAIEFTREAAANPQRTQSRLRTLEKLYESAEEVVDAGLTAELAEFKENKHVLSDKYYLYFTQLGRDVYTGDTISLDKLNDYDVDHILPQSFIKDDSLDNRVLTIRAVNNGKSDNVPAKMFGKKMGSFWRYLLDNGMISKRKYNNLITDPDNISKYAQKGFINRQLVETSQVIKLTANILNGIYDKDTEIIEVPAKMNSQMRKMFDLVKVREVNDYHHAFDAYLTIFIGKYLYKCYPKLRPYFVYGKFKKFGDNEDIEVGDGRFNFLNRIERLKNVTDPETGEILWSNVAPNETIKQIKKVYNYKFMLVSRETTTRRAELFNQTVYPKNYRGKLIPIKEDRPTDLYGGYSGNTDAYLAIVALEDKKKGKYFKVVGIPTRAAAKLEKLKQQDSQQYLQALHKVIAPQFTKSTKKGIKKTEFEIVLDKVHYRQLVQDGPVKMMLGSSTYKYNAKQLVLSEKALQVIADDRKFDETQKDDNLIAVYDEILSIVNQSFDLYDINGFRKKLNDNRDQFIDLPAETKYEGRKVVAHGKREMILEILKGLHANAAFGNLKPIGFSTAFGQLQVPNGIILSKNAILIHQSPSGLFERKIKLSDL

SEQ ID NO: 598 - protein, 1229 aa, Pediococcus acidilactici; identical to SEQ ID NO: 130

SEQ ID NO: 599 - protein, 270 aa, Pediococcus lolii
LFNQTIYSAKASKTMIPIKNDRPTKLYGGYSGNEDAYMSIIRLSDKKKTYKVVGISMRDASKLKAYENNAHEEYLKKLKEVIEQQFLDSGKKTKADFEIVIPKVNYHQRMQDGTKQFRIGSSKYVHNTKQLVLSEKTLKAIRNNKQYNGDAEKDLINAFDEILTIVNDSFSIFDIRSFRKKLNESRDKFVSLPVEDTKEKSKVIKGKRETLKQILIALHANGTSQDIPQLGLKSFGKMVKTGGLTLSENTALIHQSPSGLFEHKIKLSDL

SEQ ID NO: 600 - protein, 1016 aa, Pediococcus lolii
MNGIFDAHLAEVDPTFLARLKESNRSNLDPKKSFQGSLLFPERKDYQFYKEYPTIYHLRKALMEKDRKFDIREIYLAVHHIIKYRGNFLNGTPMRSFKVENIELDTLFDRLNQLYEEIIPDNELAFDLEQVADVKEVLSSTTIYKMDKKKQLVKMMLLPASNKALQSENKKIVTQFVNAILNYKFKLDVLLQVETDADWSLKLNDEGADDKLEEFTGDLDENRLEIIDLLQRLHNWFSLNEITKDGNSLSAAMVEKYKDHRHHLELLKKVIEDHSDAKKAKALKETYTAYVGKTDDKTQNKDDFYKAVEKNLDDSPEAKEIKRLIQLDQFMPKQRTGQNGAIPHQLHQQELDQIIEKQSKYYPFLAEPNPNVKRRKDAPYKLDELIAFKIPYYVGPLVTPEEQAQNKENVFAWMKRKAAGPITPWNFDEKVDRMESANRFIRRMTTKDTYLFGEDVLPAESMIYEKFVVLNELNNLKINGRHLSLKDKQDIYNDLFKQQKTVSIKALQNYYVTKKKAATAPTVGGLADPKKFLSSLSTYIDFKNMFGERVNDPQFQEDLEQIVEWSTIFEDRGIFKAKLQALGWLSEKQIQQLVAKRYKGWGRLSKKLLTGLKNAEGYSILDEMWHSTENFMQIQTRPEFAALIQQANEKQFEGNDPDNVWENIENILGDAYTSPQNKKAIRQVVKVVQDIEKAVGNPPEKIAIEFTREAAANPQRTQSRLRTLEKLYESAEEVVDAGLTAELAEFKENKHVLSDKYYLYFTQLGRDVYTGDTISLDRLNDYDVDHILPQSFIKDDSLDNRVLTIRAVNNGKSDNVPAKMFGKKMGSFWRYLLDNGMISKRKYNNLITDPDNISKYAQKGFINRQLVETSQVIKLTANILNGIYDKDTEIIEVPAKMNSQMRKMFDLVKVREVNDYHHAFDAYLTIFIGNYLYKCYPKLRPYFVYDNFKKFGNKEDIGHKRFNFLGKIERDKKVVAPETGEILWSNVAPNETIKQIKKVYDYKFMLTSHETYTKHG

SEQ ID NO: 601 - protein, 1333 aa, Planococcus antarcticus
MKNYTIGLDIGVASVGWVCIDENYKILNYNNRHAFGVHEFESAESAAGRRLKRGMRRRYNRRKKRLQLLQSLFDSYITDSGFFSKTDSQHFWKNNNEFENRSLTEVLSSLRISSRKYPTIYHLRSDLIESNKKMDLRLVYLALHNLVKYRGHFLQEGNWSEAASAEGMDDQLLELVTRYAELENLSPLDLSESQWKAAETLLLNRNLTKTDQSKELTAMFGKEYEPFCKLVAGLGVSLHQLFPSSEQALAYKETKTKVQLSNENVEEVMELLLEEESALLEAVQPFYQQVVLYELLKGETYVAKAKVSAFKQYQKDMASLKNLLDKTFGEKVYRSYFISDKNSQREYQKSHKVEVLCKLDQFNKEAKFAETFYKDLKKLLEDKSKTSIGTTEKDEMLRIIKAIDSNQFLQKQKGIQNAAIPHQNSLYEAEKILRNQQAHYPFITTEWIEKVKQILAFRIPYYIGPLVKDTTQSPFSWVERKGDAPITPWNFDEQIDKAASAEAFISRMRKTCTYLKGQEVLPKSSLTYERFEVLNELNGIQLRTTGAESDFRHRLSYEMKCWIIDNVFKQYKTVSTKRLLQELKKSPYADELYDEHTGEIKEVFGTQKENAFATSLSGYISMKSILGAVVDDNPAMTEELIYWIAVFEDREILHLKIQEKYPSITDVQRQKLALVKLPGWGRFSRLLIDGLPLDEQGQSVLDHMEQYSSVFMEVLKNKGFGLEKKIQKMNQHQVDGTKKIRYEDIEELAGSPALKRGIWRSVKIVEELVSIFGEPANIVLEVAREDGEKKRTKSRKDQWEELTKTTLKNDPDLKSFIGEIKSQGDQRFNEQRFWLYVTQQGKCLYTGKALDIQNLSMYEVDHILPQNFVKDDSLDNLALVMPEANQRKNQVGQNKMPLEIIEANQQYAMRTLWERLHELKLISSGKLGRLKKPSFDEVDKDKFIARQLVETRQIIKHVRDLLDERFSKSDIHLVKAGIVSKFRRFSEIPKIRDYNNKHHAMDALFAAALIQSILGKYGKNFLAFDLSKKDRQKQWRSVKGSNKEFFLFKNFGNLRLQSPVTGEEVSGVEYMKHVYFELPWQTTKMTQTGDGMFYKESIFSPKVKQAKYVSPKTEKFVHDEVKNHSICLVEFTFMKKEKEVQETKFIDLKVIEHHQFLKEPESQLAKFLAEKETNSPIIHARIIRTIPKYQKIWIEHFPYYFISTRELHNARQFEISYELMEKVKQLSERSSVEELKIVFGLLIDQMNDNYPIYTKSSIQDRVQKFVDTQLYDFKSFEIGFEELKKAVAANAQRSDTFGSRISKKPKPEEVAIGYESITGLKYRKPRSVVGTKR

SEQ ID NO: 602 - protein, 211 aa, Porphyromonas catoniae
MGKKVLGLDLGVGSIGWCLITLDKDEKPQSILGMGSRIVPLSADDATEFTQGKAITKNKMRTVARTIRKGMDRYQLRREALKKVLREHAMLPDEALIKLPLLELWELRARAATPGEQVSLTELGRVLLHINQKRGYKHAKADEAAEAETKKGKETGYVAQVKGRYQILKEKGLTIGQHFAGELRANQQTAPRGTYYTYRIKEQVYPRVRGV

SEQ ID NO: 603 - protein, 1009 aa, Porphyromonas catoniae
MRIIREAYIEEYDRIMAVQRVFYPELLTDALIGRIRDRIIFYQRPLKSCKQLVSFCEFEKKEKVIRVKHTNKEGVQELVEKTITIGPKVAPKSSPIFQVCKVWESIHNIRLYHPDGTERKLEQEEKQKLFDYLQRNDKLSLTTLRKELKIKPKDKLWCDKLLEKGIAGNTTAAILRKAFKGYEHYERLFRFDLVRRDSHEADEDGVIRPIIDESYQNEPLYKLWHILYSIEDRAEMRSALIGQLGIKAEDLDNGLMDALYKIDFVKQGYGNKSAKFICKLLPHLQEGKMYSEAAEAAGMRHSDSMTAQERDERNLLEEIPLLQKNALRQPVVEKVLNQMINLVNALKREHGEIDEVRVELARELKMSREEREKATKNNSSREKENKAIAERITEYGLTPTKSRIQKYRLWQESAESCIYCGKRVDVVQFLRGEETEVEHIIPKSILFDDSLSNKACACRSCNQEKGNRFAMEYIQAKGWEQDYIERVDSLFHDKKISYSKRQHLLMLPKDLPEDFIERHLRLSQYISREAQGILRKGIRLVSASEGGVTAKLRQLWGYDNILRDLNLERYKSMGETEVVTVEHRDGQRTDERIKDWSKRKDHRHHAIDALVVACTRQSYIQRLNRVNAEADRQEMDAFIKEQQQEHKLSKKEKLSLLENWLKEQPHFTTGEVKEHAEGILISFRPGKRTVSRGRNIYKRSGKTDVQRNVLIPRGALSEETVYGVISVDGENKVVCKYPLQKFLDTKETNVDKIADQAAEKIVDKVLREKIRERIKRYGKKEAFAEPLYLDEAQTQVVRSVRCFISKDQAKLIPLRYNDESEAVGFVAPGNNHHLALYRDASGKMRASVVSFFAAVERARYGIPMIVLNPRETREKARIIPDLPESIFSKLPEEDWVLEETLQEGEMVLLGMENDAIEEAIKKKDYSKLSRYLYRVQSLSYNDYKFCFHLETESEKKEKKKGEDKKRGEKAKNTAVMPPKRYRIRCLATYQEDLNPRKVKIDLLGRISLA

SEQ ID NO: 604 - protein, 1197 aa, Porphyromonas sp.
MLMSKHVLGLDLGVGSIGWCLIALDAQGDPAEILGMGSRVVPLNNATKAIEAFNAGAAFTASQERTARRTMRRGFARYQLRRYRLRRELEKVGMLPDAALIQLPLLELWELRERAATAGRRLTLPELGRVLCHINQKRGYRHVKSDAAAIVGDEGEKKKDSNSAYLAGIRANDEKLQAEHKTVGQYFAEQLRQNQSESPTGGISYRIKDQIFSRQCYIDEYDQIMAVQRVHYPDILTDEFIRMLRDEVIFMQRPLKSCKHLVSLCEFEKQERVMRVQQDDGKGGWQLVERRVKFGPKVAPKSSPLFQLCCIYEAVNNIRLTRPNGSPCDITPEERAKIVAHLQSSASLSFAALKKLLKEKALIADQLTSKSGLKGNSTRVALASALQPYPQYHHLLDMELETRMMTVQLTDEETGEVTEREVAVVTDSYVRKPLYRLWHILYSIEEREAMRRALITQLGMKEEDLDGGLLDQLYRLDFVKPGYGNKSAKFICKLLPQLQQGLGYSEACAAVGYRHSNSPTSEEITERTLLEKIPLLQRNELRQPLVEKILNQMINLVNALKAEYGIDEVRVELARELKMSREERERMARNNKDREERNKGVAAKIRECGLYPTKPRIQKYMLWKEAGRQCLYCGRSIEEEQCLREGGMEVEHIIPKSVLYDDSYGNKTCACRRCNKEKGNRTALEYIRAKGREAEYMKRINDLLKEKKISYSKHQRLRWLKEDIPSDFLERQLRLTQYISRQAMAILQQGIRRVSASEGGVTARLRSLWGYGKILHTLNLDRYDSMGETERVSREGEATEELHITNWSKRMDHRHHAIDALVVACTRQSYIQRLNRLSSEFGREDKKKEDQEAQEQQATETGRLSNLERWLTQRPHFSVRTVSDKVAEILISYRPGQRVVTRGRNIYRKKMADGREVSCVQRGVLVPRGELMEASFYGKILSQGRVRIVKRYPLHDLKGEVVDPHLRELITTYNQELKSREKGAPIPPLCLDKDKKQEVRSVRCYAKTLSLDKAIPMCFDEKGEPTAFVKSASNHHLALYRTPKGKLVESIVTFWDAVDRARYGIPLVITHPREVMEQVLQRGDIPEQVLSLLPPSDWVFVDSLQQDEMVVIGLSDEELQRALEAQNYRKISEHLYRVQKMSSSYYVFRYHLETSVADDKNTSGRIPKFHRVQSLKAYEERNIRKVRVDLLGRISLL

SEQ ID NO: 605 - protein, 1422 aa, Prevotella denticola
MTQKVLGLDLGTNSIGSSVRNLDLSDDLKGQLEFFSSDIFRSSVNKESNGREYSLAAQRSAHSRSRGLNEARRRKLWATLDLLIKYGFCPMSPESLMRWRTYDKQRGLFREYPIDDKNFNAWILLDFDGDGKPDYSSPYQLRRELVIRQFDFDQPIERYKLGRALYHIAQHRGFKSSKGETLSQQETNSKQSLTDDTADVAGEMKASEEKLSKGLSTYMKENNLLTVGAAFAQLEDEGVRVRNNNDYRAIRSQFQREIETIFKFQQGLSVENELYERLVSEKKNIGTIFYKRPLRSQRGNVGKCTLERTKPRCAIGHPLFEKFRAWTLINNIKVRMSEEEQAEQLPMKLRFELYNDCFLAFVRAEFKFEDIRKYLEKRLGVHFSYNDKTINYKDSTSVAGCPITARFRKLLGEDWESFHVDGQKQRQAHGKNNASFHTVSYSTNDIWHFCYDAEEPEAVLSFAQDNLKWEKKKAEELVRIWSAIPQGYAMLSQKAIRNINKMLILGLKYSDAVLLAKVPEIVEITDGEILSVTEDYHRVEAQVGYEKQINNIVNALIAKYKSASEEYRFADHNYEYQLDKSDEKDIIKQIESNIGTRKWSLLDADEQTDILQKVRDKYQNFFRSHERKFVESPKLGECFEEYLMKKFPMVEGERWKKLYHPSQIAIYRPVPANKDRSALRLGNPDIGAIKNPTVLRVLNTLRKRVNQLLDDGIISPDETRVVVETARELNDANRKWALDTYNRIRHDENEKIKKILAEFYPKRDNISTVDIDKARYVIDQREMDYFTEAKTYHKDIKKYKLWLEQGGQCMYTGRTINLSNLFDPNSFDVEHTIPESISFDSSDMNLTLCDAHYNRFIKKNHIPADLPNYDKSVVIDGKEYSPIKPRLQRWADRVERLNRNVEYWRGQARRAQNKDRKDQCMREMHLWKMELEYWTKKLERFTITEVTDEFKNSQLVDTRVITRHAVLYLKSIFPHVDVQRGDVTAKFRKILGIQSVDEKKDRSLHSHHAIDATTLTIIPGAAKRERMLELFAKIEEVNKMLSFSGNEDRTGLKQELDGLKNQLNKEVKACRIGHNVSEIGTFINDNIIINHHVKNQALTPVRRRLRKRGHIVGGMDNPRWQTGDALRGEIHKASYYGAITQYAKDKEGKVLMKEGRPQINPTIKFVIRRELKYKKSSTDSGFASWDDLGKAIVDKELFALMKGQFPEGTSFKDACEQGIYMIKKGKNGEVDTKLYRIRHIRCKTKQKNALKIKEQAYKSEKEYKRYFYAAVGDLYAMCCYTNGKTREFKIYSLYDISCHRKVGVEDIPEFITDKKGNRLMLDYKLHTGDMILLYKENPEELYDLDNVSLSKLLYKINGFENDGLRIRMVNHLVAKEAMGESVKDYAKLPDIIRCGVKTIKFLVMGENRDFVIKNGKISFNHR

SEQ ID NO: 606 - protein, 443 aa, Prevotella disiens
MELDYWKGKYNRFTMTEIPEGFSRRQGMGIGLISRYAGLYLKTIFHKKDNPQKSNVYIVKGSITAEFRRIWNIQDDYEKKCRDNHIHHCIDAIVVGCIGKREYDLMAQFYRDEEKYRWEKKKKPFFKKPWETFTQDMLSLKDEVLTVHFNPSNFTKKAHKKVFTPKGIFVAQGDCARVKLHKESYFGAIEQKGEIKYVMRKELSALKIEDIKNIVDAVVKEKVLAVVKKKGFKQAMAEPIYMNEDKRILIKKVRLFVSQTNPLIVKKHRDLSSKEYKQNYYVDNEGNLMIAMYEGVKKNGKIDREITVVNNLEAAKFFRQSQKNNAEKQLISHLSPKNGYPLKTVLTQKQLVLMYEDSPKEIKLRDTKNMVKRLYQVVEIEKDGRVKLKFHQEARSEGLNKNSAAFKIQDTPESLYRHTKSNLKVLVNGVDFKINILGEISLI

SEQ ID NO: 607 - protein, 1375 aa, Prevotella histicola
MKKILGLDLGTTSIGWALVYESENTDEKSSIVRLGVRVNPLSVDEKGNFEKGKAITTNADRQQTHGARINLQRYKLRRENLKDCLQKQGWIGTEALCEEGKTSTFETYMLRAKAAEEEISLHELCRVLFMMNKKRGYKSNRKANNKEDGKLFDGMTVAKKLYEEHLTPAEYSFQLLSSGKKFKQEYYRSDLKEEFDRIWNEQQKYYPEILTDDFKQQLQGKSKGNTSKIFLGKYGIYSADLKGLDRKLQPLKWRVEALKQQVDKEVLAFVISDLNGQIASTSGLLGAISDRSKELYFNKQTVGQYLWTSLKETPHVSIKNKPFYRQDYLDEFEKIWETQATYHKELTPELKQEIRDIIIFYQRPLKSKKGLISVCELEQRKVKVTIDGKEKEISIGPKVAPKSSPMFQEFRIWQNLNNILLIDKGNNSIHPLYEEEKNLLYEELSVKEKLSKAEALKVLNKNSKQWDLNYKEIEGNRTQAVLYDCYNRIIVMTGHEEYNFKKLKASEIRSYVKTTFTGLGFNTDILEFDSSLTGHELEKQPMYQLWHLLYSYESDNSRTGNDALLRKLETAFGFPKEYAAVLSDVVFEDSYGNLSVKAMRKILPHLQAGLNYSQACEEAGYKHSRRSLTKNELDQKEYKEKLELLPKNSLHNPVVEKILNQMINVINAVIDEYGKPDEIRIELARELKIGAAERENMTRSINQGNAENKRIREILEKEFALSYISRNDIIKYKLYEELKSNGFKTLYSDTYISKDKLFSKDFDIEHIIPKARLFDDSLSNKTIEARDVNIAKSNKTAFDFISEKYDQQGIEAYKKKLDILLQDGSISKAKYNRLLMKEADIPSGFIDRDLRDTQYIAKKAYEILSDLVRNVTPTTGAVTSRLREDWQLVDVMKELNFEKYQKLGLVEVIEDRDGRKIKRIKDWTKRNDHRHHAMDALTIAFTKPSYIQYLNNLNARSDKNSSIYGIENKELHREDNKLRFNAPLPINEFRAEARRHLKSILVSVKAKNKVMTQNVNVIKTKHGVIKKVQLTPRGELHNATFYGTKKRPIIKMVKVGAALDEVTIKKVSSSFIREALLDRLHEYNGDAKKAFTGRNSIDKNPIYIDEEHKKTVPALVKTIEWEMYHPTRKLISPDLKIDKVIDKGIREILKTRLAKFNGDAQKAFSNLDENPIYKDEAKKITLKRVSLEGVSSVIPLHTLKDREGKLVVGKDGKPVLGDYVQTSNNHHIAFYMDENGNLQDNVVSFFEAAERKSQGVPVIDKNYNHDKGWNFLFTMKQNEYFVFPNEVTGFNPSEVDLMDEANYSIISPNLYRVQKMSKASGRDYWFRHHLEAMLNDDPKLRNSMFKRITSLKALEGIVKVRINCIGKIVAVGEYD

SEQ ID NO: 608 - protein, 1380 aa, Prevotella intermedia
MKRILGLDLGTTSIGWALVNEAENNNEASSIVRLGVRVNPLTVDEKSNFEKGKAITTNADRQLRHGARINLQRYKLRRQNLHDCLQKQGWLGTEAMYEEGKASTFETYKLRAKAAEEEISLHEFARVLFMLNKKRGYKSNRKANNKEDGQLFDGMTIAKKLYEEHLTPAEYSLQLLNKGKKFTQGYYRSDLNAELERIWDEQKKYYPEILTDEFKQQLEGKTKTNTSKIFLAKYGIYSADLKGLDRKFQPLKWRVEALQQQVDKEVLAFVISDLKGQIANTSGLLGAISDRSKELYFNKQTVGQYLWASLEENPHISIKNKPFYRQDYLDEFEKIWETQAAFHKQLTPELKQEIRDIIIFYQRPLKSKKSLISVCELEQRKVKATIDGKEKEITIGPKVAPKSSPVFQEFRIWQNLNNVLLIDNDTNEKRPLDEVERNLLYKELSIKAKLSKTEALKILNKKGKQWDLNYRELEGNRTQAILFDCYNRIITLTGHEECDFKKIKASEIRHYVSTIFKNLGFSTEILDFDPSLKKHELEKQPMYQLWHLLYSYESDNSRTGNESLLRKLETTFGFPEEYATVLCDVVFEEDYGNLSVKAMREILPYLQAGNDYSQACAYAGYNHSRHSLTKEELDQKVYKERLELLPKNSLRNPVVEKILNQMINVINAIIDEYGKPDEIRIEMARELKSSAADRKKTTHAISQGNAENQRIREILEKEFSLSYISRNDIIKYKLYEELEPNYYKTLYSDTYITKDKLFSKDFDIEHIIPKARLFDDSFSNKTLEARNINLEKSNKTAFDFIKEKYGEDGAEAYKKKLDMLLENDAISRPKYNNLLRAEADIPSDFINRDLRNTQYIAKKACEILGELVKTVTPTTGKITNRLREDWQLVDVMKELNFEKYEKLGLTEIVEDRDGRKIKRIKDWTKRNDHRHHAMDALAIAFTKPSFIQYLNNLNARSNKGDSIYAIENKELHYEEGKLRFNAPIPVNEFRAEAKRHLSAILVSIKAKNKVMTQNVNKIKTKHGIIKKIQLTPRGPLHNETIYGTKMRPIIKMVKVGAALDEATINKVSSPAIREALLKRLNEYSGNAKKAFTGKNTLEKNPIYLNAGRTKTVPSLVKTVEWESFHPTRKLIDKDLNVDKVVDKGIREILKARLEEFNGDAKKAFSNLEENPIYLDEAKKIALKRVSIEGVLSAIPLHTLKNQAGKPITGKDGKPVLGNYVQTSNNHHIAFYYDEDGNLQDNAVSFFEAAERKSQGIPVIDKDYNRDKGWRFLFTMKQNEYFVFPNEATGFIPSEVDLTDEANYGIISPNLYRVQKVSRIDKGTSASRDYWFRHHLETILNDDAKLKNLAFKRIRGLLELKDIIKVRINSTGKIVAVGEYD

SEQ ID NO: 609 - protein, 129 aa, Prevotella multiformis
MQKGGTGCKINRQTVGNVEVNVLNLRLYDRTDDREVTAGYLPTKEDYVRLFVYLNDRKEINQDTLLKDYFRLKKVKCGNEKEFAIRWNYIEDKEKKYPCNETRHELLAALDRAGMEHGWLDDSGTSARW

SEQ ID NO: 610 - protein, 535 aa, Prevotella multiformis
MVKGLLSNIVRTAEEREETSKFVISCTGRITDRLKQDWGLNDVWNSLVYTRFKRLNELTETEAFGHWQDKDRRVFQTSVPLELQRGFSKKRIDHRHHAMDALVIACASRNIIGYLNNESAESPEKREDLRRKLCDKNHIIRKPWESFTQDARAALEDIVVSFKNYVRIINKATNYYERYDADGRKTKAEQKGGEMWAVRKPMHEATYYGKVNLRRKERVSLKAALEDIPSICNRDLRDYINGLVEKHFNKEQVLAQFRSVGNRWNKQHIDKVDVWRFSDGKEEMVATRKPLDTSFDAKRIEAVTDTGIQRILSNYLEAKGGDPKIAFTPEGIADMNQHITAYNNGKQHKPILKVRVSTKLGKKYPVGQTGCKAGQFVVAEAGTNLYFAVYEDGEGNRSYDTIPLNEAVECLKQGLPPVPETREKGDRLKFYLSPNDLVYVPAGDEENEIDRERIYKFVDSSGTTANFIPHRTAGLIYNVDKKLAEALCNGSIIQNEYGVGSQQSKNQKALTGEMVKAVCWKLEVDRLGNILRIIK

SEQ ID NO: 611 - protein, 1380 aa, Prevotella nigrescens
MKRILGLDLGTTSIGWALVNEAESNNEASSIVRLGVRVNPLTVDEKSNFEKGKAITTNADRQLRHGARINLQRYKLRRQNLHDCLQKQGWLGTEAMYEEGKASTFETYKLRAKAAEEEISLHEFARVLFMLNKKRGYKSNRKANNKEDGQLFDGMTIAKKLYEEHLTPAEYSLQLLNKGKKFTQGYYRSDLNAELERIWDEQKKYYPEILTDEFKQQLEGKTKTNTSKIFLAKYGIYSADLKGLDRKLQPLKWRVEALKQQVDKEVLAFVISDLKGQIANTSGLLGAISDRSKELYFNKQTVGQYLWASLEENPHISIKNKPFYRQDYLDEFEKIWETQATFHKQLTPELKQEIRDIIIFYQRPLKSKKSLISVCELEQRKVKATIDGKEKEITIGPKVAPKSSPVFQEFRIWQNLNNVLLIDNDTNEKRPLDEDERYLLYKELSIKAKLSKTEALKILNKKGKQWDLNYKELEGNRTQAILFDCYNRIITLTGHEECDFKKIKASEIRHYVSTIFKNLGFSTEILDFDPSLEKHELEKQPMYQLWHLLYSYESDNSRTGNESLLRKLETTFGFPEEYATVLCDVVFEEDYGNLSVKAMRKILPYLQAGNDYSQACAYAGYNHSRHSLTKEELDQKVYKERLELLPKNSLRNPVVEKILNQMINVINAIIDEYGKPDEIRIEMARELKSSAADRKKTTHAINQGNDENQCIREILEKEFALSYISRNDIIKYKLYEELKPNGFKTLYSDTYIPKDKLFSKDFDIEHIIPKARLFDDSYSNKTLEARDINLAKSNKTAFDFVKEKYGEQGAEAYKKKLDMLLGNNVISKPKYNKLLMTEADIPSDFINRDLRNTQYIARKACEILGELVRTVTPTTGKITNRLREDWQLVDVMKELNFEKYEKLGLTEIVEDRDGRKIKRIKDWTKRNDHRHHAMDALAIAFTKPSYIQYLNNLNARSNKGDSIYAIENKELHYEEGKLRFNAPIPVNVFRAEAKRHLSAILVSIKAKNKVMTQNVNKIKTKHGIIKKIQLTPRGPLHNETIYGTKMRPIIKKVKVGAALDEATINKVSSPAIREVLLKRLNEYSGNAKKAFTGKNTLDKNPIYLNAERTKTVPASVKTVEWENYHPIRKPITPDLKVDKVIDKGIGEILKARLEEFNGDAKKAFSNLEENPIYLDQTKKIALKRVSIEGVLSTIPLHTLKNQAGKPIMGKDGKPVLGNYVQTSNNHHIAFYYDEDGNLQDNAVSFFEAAERKSQGISVIDKDYNRDKGWRFLFTMKQNEYFVFPNEATGFIPSEVDLTDEANYGIISPNLYRVQKMSRIEKGTSVSRDYWFRHHLETILNDDSRLKNSAFKRINSLKPLEGIIKVRINSIGKIVAVGEYD

SEQ ID NO: 612 - protein, 1506 aa, Prevotella nigrescens
MKTILGLDLGPNSIGWAKVEVDDEGNYLRNIKLGSRIIPMTQDMLGDFDKGVKVSQTAIRTDFRGNRRLIERHLLRRERLHRVLHALKFLPKHYEDAIGWDRNEPATYGKFVNNSEPKLAWERQEDGSMRFLFMESFNEMVADFAQNQPSLVSDGKKIPLDWTIYYLRKKALTRPIKKEELAWILLNFNQKRGYYQLRGEEEEDNLTKRKEYYKLKVVGVEADGAPKGGKTWYNIHLENGWTARCQSKIPLDDWVGKVKEYIVTTEYEDDGKTPKCDKEGKVKRSFKSPEKDDWQLIKTRTEKFIDDSNKTVGAFIYDYLLEKPFDKIRGKYIRTIERKYYKNELREILREQTKYHEGLHSLEALKICAEELYKNNQQHQEYLLKKDMTFLLLNDLIFYQRPLKSKKSLIADCPYEVYKYDDKLTGKKGQKKIKCIAKSNPYYQEFRLWQFIANLRLFSVTDGKEVTAEYLKTEEDYVRLFSFLNDRKDIKQETFLRSFLKLKKESIGSEKIYPIRWNYIEDANKSYPCNATRHELLLAFDRADIPRELLDVEEREYRLWHLLYSIEAKEETESALRKLKANKAFGDLNIDDAFVNSFLKIKPFEKEYGAYSEKAIKKLLAVMRRGSLWKEADICEATKQNIAKILQNDIDEKLKKKIEAAVSSFNKLSDFQGLPTWLACYVVYGRHSEAAQIQCWQSPEDLKTYINKFKQHSLRNPIVEQCLLETLRTVYDIWKDAGQIDEIHIELGRNMKSTAEQRARKTKDILRNENTNLRIKNLLVELKNDDKIENVRPYSPSQQEILRIYEEGALQELSKEDEMFEDISKISKMAQPSPTELSRYKLWLEQKYRSPYTGRVIPLSKLFTTAYQIEHIIPQSRYFDDSFNNKVICESEVNSLKDNMLGYEFIKECGGRIVHCTLLGDVKIFTKEEYKDFVTKHYIDNTYKRDKLLLEDIPQEFSARQLNDSRYISKMVQTVLSNIVRAENEQEATSKFVVSCNGAITNRLKKDWGLNDVWSSIVCPRFKRLNEITKTNAFGHWEDKAGKHVFQTTVPLELQRGFSKKRIDHRHHAMDALVIACASRNIVNYLNNESANSPEKREDLRKKLCDEKRKIRKPWKTFTQDAREALSDVVVSFKNYVRVINKATNYYEHYSSSGNKVMISQKGNDMWAIRKPLHKESVFGRVNLCRKVIVSLKKALENIPAICDKTLRDYINALVEKHFNTRQLLAHFKSINYRLNRQCVEKVEVWQFSDEKIEMVARRKSLDTSFDDKQISSITDTGIQKILLNYLQTKDGNAEIAFTPEGIEEMNKNISLYNDGKAHQPILKVRVATPKGMKYPVGQTGNKATKFVVAEKGTNLYFAIYENELGVRSYDTIPLNIVVERLKEGLSPVPQANEADIPLKFYLSPNDLVYVPTKENEDELCRDRIYKFVDSSGTTANFVPHTSANTIYNVDKEYAEKCCNGAVFLNEYGLGSPQSKNQRALTGEMIKEICWKLKVDRLGNIIKVIK

SEQ ID NO: 613 - protein, 774 aa, Prevotella oulorum
MEQCILETLRTVYDIWKEAGQIDEIHVELGREMKQTAEQRAHLTEKVLRNENTNLRIKSLLMELKNDADMKDVRPYSPMQQEILRIYEEGALQTLSKDDAAFTEIMKISKMAQPSASELQRYRLWLEQKYRSPYTGKPISLSKLFTSAYQIEHIIPKKRYFDDSFSNKVICEAEVNGKKDSMLAYEFIKDCGGDVIHCTTLGDVTILSEAEYKALVTELYANNKSKKDKLLMEDIPQDFINRQLNDSRYISRVVMTLLSNIVRIEGEEEATSKFVIPCSGGITDKLKKDWGLNDVWNNIVYPRFERLNALTNTSDFGQWENKEGKRVFQTSVPLELQRGYQKKRIDHRHHAMDALVIACASRKIINYLNNQEANDPTKQENARKQLCIKSRIIRKPWETFTQDAYKALDNIVVSFKNYVRVINKATNYYERYNADGKKAVDEQKGEAMWAIRKPMHKDTVFGHVNLRRKAVVKLKDALENIPAICDKTLRHYIQDLQKKHFNTKQLLAHFKSINYRLNKQAVDKVEVWQYSDDKEQLAATRKPLGPSFDAKCIAAITDTGIQKILLNYLQAKGGDPAIAFTPEGIAEMNQNIAVYNGGKQHQPILKVRIAKPMGKKFPIGQTGNKAFQYVIAEEGTNLYFAIYEDEEGNRTYDTIALREVVERLKQGLTPVPEKNEKGVALKFHLSPNDLVYVPTADELLSKVCSLDKNRIYKMVSATKSECLFIPHSVAKTIYDKVEFEALNKMGRALTGEMIKSVCWKIEVDRLGHIVNIIK

SEQ ID NO: 614 - protein, 691 aa, Prevotella oulorum
MKTILGLDLGTNSIGWAKVIVDDNENYLRDIQLGSRIIPMSQDVLGKFDKGVTESQTAIRTSFRGVRRLRERTLQRRERLHRVLHTLHYLPPHYDSAIGWDRKTPTTYGKFLNHGEPKLAWERREDGTMQFLFMDAFHEMIADFAKYQPALVADGKKVPLDWTIYYLRKKALTQPIKKEELAWILLNFNQKRGYYQLRGEEDEENAAKHEEYHELKVVGVEVDEAGKGDNTWYNVKLENGWTYHRQSKIPLDDWVGKVRAFIVTTEYEKDGTTPKKDKEGNVKRSFRSPDEKDWGLRKKQTEHSLEASGTPVGAFIYDHLLKEPSDKIRGKFIHTIERKYYKQELAAILREQSKHHEKLCSKDMLKACIEELYPNNPLHRESLLKKDMPYLLIEDLIFYQRPLKSKKSLIAECPYEAYSYVDKETGEMKRQGIKCIAKSNPYYQEFRLWQLIANLRLRNRSDERDVTAEYLPHQEDYVRLFTYLNDRKEINQETLLKDFFKLKKVTIGGEKVFPIRWDYIEDKEKKYPCNATRHELLLALDRAGIEHDWLNDRDLAYRLWHLLYSVDSKDETERALRKLKDDDAFVESFLKIKPFEKEYGAYSEKAIKKLLPVMRRGSLWNEADLCPSTKERIANILQGTIDEKLKKKIGAFISSCQQVSDFQGLPEWLACYVVYGRHSEATDIQRWETPE

SEQ ID NO: 615 - protein, 242 aa, Prevotella saccharolytica
MKLVLGLDLGVGSVGWALIFITDSGEPIKILALGERIVSMDSNNSNEFSAGATCTLNQKKTKAKSVRKGYSRYVQRRDALTAELRHIGMMPDETLIKLPVLDLWQLRANAATEGKKLSLAEIGRVLYHINQRRGYKHGKSDVSSDNKQKGYVKAVNERYCMIQERQQTIGQYFALKLKETAVTTEKGTFYTFRIKDQVFPREAYEEEFVVAYSTKVLKFKQITTLLNVVICLMMLLLIVQRY

SEQ ID NO: 616 - protein, 1174 aa, Prevotella sp.
MEFHPELCDAELLKACAEELYRNNEAHRAQLLAKDFKHLLVEDVLFYQRPLKSKKSLIANCPYETRQYINKETGEIKDVNVKCIAKSNPYFQEFRLWQWISNLRLLRQADGQDVTAAYIKGNEDKERLFDLLNNQGEIKQEHILRDFLKLKKPKGGEFPLRWNYVDDKIYPANETRHAINKAIKGMAVDKEEKETLGQLLDQPAVAYMLWNLLYSITDRNELARALRRFALTHGVSSVDAFVESFLKVKPFKKEYGAYSEKATKKLLQVMRLGKYWCGDELPEPAKRTKGNKQAVYDEMAHRGICKQTLQNISNIIEENIDERLMGALLNPERPLTELSHFQGLSVSDACYVVYGRHSEVAEIVKWKDADELNTFINNFKQHSMRNPIVEQCVLETLRTVRDVWEQEGQIDEIHVELGRNMKRTAEQRARDTQAIQRNENTNMRISLLLTELKNDPSISDVRPYSPSQRELLKIYEEGALENLTNQDEDIAKISRLAQPSASELRRYKLWLDQKYVSPYTGRPIPLAKLFTPAYEIEHIIPQSRYFDNSFSNKVICEAEVNKLKDNLLGMEFIKKFGGKTKGILDEEAYKLHVTTNYAHNPAKRSKLLMEDLPTDFNSRQLNDTRYISKTVMALLSNVVREEGERETRSKHVVVCTGGVTDTLKKDWGLHDVWHNLVYPRFIRLNNLTGSQNFGYWRYLNEENSKKGEDSKKVFQITLPPECQRGFVKKRIDHRHHAMDALVIACASANIVNYLNNQSAANPHIHENLQRLLCDRKREIRKPWPTFTQDAQAALKDLVVSFKNTVRVVNKASNTYLRYDKDGKKKRFKQEGEGLKAIRKPMHKETYYGEVNLIRKEMVPLKRALDDVNAIVDKELRASIKGLLRDGFNPQQVLANFKAKDFKFDKRDIKKVEVYVSSEKSTPMVATRKSLDTSFNAKRIADITDTGIQKILLNYLKANDNSPEQAFTPEGIAYLNEHIAEYNDGKPHQPILKVRVSEVKGAKFAVGQTGSKKDKFVEAQSGTNLYFAIYEDKEGKRHFETIALKVAAERLKDKQMPVPEINDAGLPLKFYLSPNDLVYVPTDEDRATAHPSIDKMRIYKMVSATDRQCFFLPFTVASVISNKVEFEALNKMERVLDASEYSSAYDSSHVNKVMVKNVCWKLEVDRLGNITKIVR

SEQ ID NO: 617 - protein, 992 aa, Prevotella sp.
MITRILGLDTGTNSLAWAVVDRDANGNYTLVKRGDVIFTEGVKIEKGIESSKAAERTAHKALRVHYSRRRLHKIDTLKVLVELNLCPCLSDEQLSQWKAKKTYPLTDDFMLWQRSGSAEENNPYYCRHRCLTQKLDLTDQSQRFLLGRAFYHLAQRRGFLSNRLDTSADSDESGKVKSGIAQLSVEMEKAGCEFLGEYFYQLYKQHGNTIKLRSRYTDREEHYKKEFLAICEKQELDPKWVEALQRAIYFQRPLKSQRKGVGKCTFEPKKPRCAESHPDYEAFRMLCFLNNVKIQTPNDTSLRPLNEDEREKIWPIFFRKSKPNFDFEDIAKALAGKNNYAWYKDAGEKPFKFNYRMQQGVSGCPVTAQLIDIFGSDWQTAIAETYTAVEKKNGTKTIDEMADDVWNVLYSFSSKDKLKAFATEKLQLDEASATKFANAKLPHGFASLSLKAIRNILPFLRQGFIYAHAVHLAKIPDIVTKAVWNDADKREMILSGLMEIIENYNPKDRGVEGTIDFCIKSHLQDVIDLRPGAADALYHPSMIETYPDAKLNKMGVFQLGSPRTNAIRNPMAMRSLHILRSVVNQLLRDGIIDRDTEVHVEYARELNDANKRKAIADYQREQEKKRKQYRDDIIALYKSECHKEIEPTDTDILKFQLWEEQNHLCLYTGTQIGICDFLGDNPKFDIEHTVPRSVGGDSTQMNLTLCDATFNRQVKGAQLPSQLSNHADILVRIDHWKSKCEDLRKQLDKIRTYGGMEKNMKDRLIQKRHRLKMDLDYWQGKYSRFTMTEVPEGFSRRQGAGIGLVSKYAGLFLKSLFHNEQNPNKSNVYVVKGVTTAEFRRMWGLQGEYEKKSRLNHCHHCIDAITIACIGKAEYDKMAQYYHDEELFQWRGTTTKPHFNKPWPTFTEDVLAIEQSLLVKHLTKDNMPKQAKKRVRTATGKYLAQGDTARGSLHKDTYYGAIEQNGEIRYVLRKPLNKFENEAELEKIVDQA

SEQ ID NO: 618 - protein, 1375 aa, Prevotella sp.
MKKILGLDLGTTSIGWALVNESENKDEQSSIVRLGVRVIPLTVDEKGNFEKGKAITTNADRQQVHAARINLQRYKLRRENLRDCLQKQGWIGSEPMCEDGKSSTFETYKLRAKAAVEEVSLHEFARVLFMLNKKRGYKSNRKANDKEEGKLFDGMTIAKKLYEEHLTPAEYSLQLLNTGRKFTPEYYRSDLIEEFEKIWNEQQKYYPEILTDEFKQQLEGKAKSNTSKLFLGKYGIYSADTKGLDRRLQPLKWRVEAMKQQVDKDVLAFVISDLKGQIANTSGLLGAISDRSKELYFSKQTIGQYLWASLQENPHISIKNQPFYRQDYLDEFEKIWETQATYHKELTSELKQEIRDIIIFYQRPLKSKKNLIAVCELEQRKVKVTVDGKEKEITIGPKIAPKSSPMFQEFRIWQNLNNILLLDHETNSKRPLYEEERNLLYEELSVKEKLSKTEALKVLGKKSKQWDLNYKELEGNRTQAVLYDCYNRIIVMSGHEECNFKKLKASDIRHYVKMIFKNLAFNTDILCFDSSLKGHELERQPMCQLWHLLYSYEGDNSRTGNDALLRKLETSFGFPKEYAAVLADVIFEDSYGNLSVKAMRNILPHLQAGKDYSQACEEAGYKHSRRSLTKEELNQKVYKEKLELLPKNSLHNPVVEKILNQMVNVINAVIEEYGKPDEIRIELARDLKIGAAERENMTRSINQGNAENKRIREILEKEFALSYLSRNDIIKYKLYEELKSNGFKTLYSDTYISKDKLFSKDFDIEHIIPKARLFDDSLSNKTIEARDVNIAKSNKTAFDFILERYGEQGVKTYKTKLLRLLEDGAISNKKYNNLLKTEADIPSGFIDRDLRNTQYIAKKAYEILSELVKIVTPTTGSVTNRLREDWQLVDVMKELNFEKYQKLGLADVIEDRDGRKVKRIKDWTKRNDHRHHAMDALTIAFTKPSYIQYLNNLNARSDKSSSIYGIEVKELHREEGKFRFNAPLPINEFRAEAKRHLKSVLVSIKAKKKVMTQNVNKIKTKHGIIKKVQLTPRGELHNATYYGTKKRPLVRMVKVGAALDEATIKRVCSPAIRAALLKRLNAYNGDAKEAFTGRNSIDKNPIYLDIEQTKLVPVLVKTIEWGMYHPIRKRITPDLKIDKVIDKGIREKLKARLAEFNGDAQKAFSNLDENPIYMDEAKRITLKRVSIEGVLSAIPLHTLKDKAGKPVIGSDGKPVFGDYVQTSNNHHIAFYIDDKGNLQDNPVSFFEAAERKSQGVPVIDRRYNCDKGWHFVFTMKQNEYFVFPNEATGFIPSEVDLLDEANYCIISPNLYRVQKLSKASGRDYWFRHHLETMLNDDLRLKNSTFKRIQSLKGLEDIVKVRINSIGKIVAVGKYD

SEQ ID NO: 619 - protein, 1483 aa, Prevotella sp.
MKTILGLDLGTNSIGWAKVSVDDYGNYLHDIKLGSRIIPMSQDVLGNFDSGVTVSQTAQRTEFRSKRRLVQRNLQRRERLHRVLHVLDFLPAHYDAAIGWDRTEAVTYGKFLNHAEPKLAWEELGNGKRRFLFMDSFHEMVADFARCQPALVADGKKIPLDWTIYYLRKKALTQAITKEELAWILLNFNQKRGYYQLRGEEEEENPTKQEEYYELKVVSVEATDSRKGNDTWYNVHLENGWIYRRSSKISLDDWVGKVKQFIVTTEYEKDGTTLKTDKEGNVKRSFRAPNENDWGLRKKRTETLLEMSGKTVGAFIYDHLLQEPADKIRGNFIRTIERHYYKAELEAILAEQCKYHIELRDKEMLEACARELYLNNLPHQRSLMKKDMTYLLLYDLIFYQRPLKSKKALIANCPYEYYEYVDKETGEIKRQNIKCIAKSNPYFQEFRLWQFVLNLRLFDRVEDKEVTANYLPTADDHARLFTYLNDRKEINQETLLKDYFKLKKVKIGNEKEYPIRWNYIEDKEKKYPCNETRYELLMALDRAGIEHKWLDDNNLEYRLWHLLYSVEVKSESETALRKLKNDDAFVNSFLKVKPFKKEYGAYSEKAIKRLLAVMRKGFLWNEQDICDETRKRIEIIIKGDVDEKVKERMGHAAYSFDRVSDFQGLPEWLACYVVYGRHSEAMDIQRWDSPERLMAYINNFKQYSLRNPIVEQCILETLRTVHDIWKETGQIDEIHVELGREMKSTSEERARRTQNVLRNENTNLRIKSLLIELKNDTDICNVHPYSPMQQEILRIYEEGALQELNREDEDFEEISKISQMSQPSGKELNRYKLWLEQKYRSPYTGKAISLAKLFTPAYQIEHVIPQSRYFDDSFTNKVICEAEVNTLKSNLLGYEFIKKHGGEIIHCTTLGDVRIFSESEYKAFVMDHYANNKSKKDKLLMEDIPQEFLSRQMNDSRYISKVVKTLLSNIVRMADESEATSKSVIVCTGGVTDRLKKDWGLNDVWNSIVYSRFERLNRLTGTEAFGHWENKDGKRVFQTSMPLELQRGFRKKRIDHRHHAMDALVIACASRNIVNYLNNESANNPKKREDLRRQLCDKNRVIRKPWETFTQDAYNALENVVVSFKNYVRVINKATNRYEHYDENGKKRFVQQKGSELWAIRKPMHKETYYGHVNLRRKELVTLQKALDDIPSICDKKLRDYISALVEKHFNKRQLLAHFKSTDYYWQKQYVNKVYVWTFSDDIKPLVATRKLLDTSFDAKRIGTITDTGIQKILRNYLEAKGGNATLAFTPEGIVEMNQNISKYNDGKPHQPILKVRITEPMGAKYRVGQTENKMAKYVEAQSGTNLYFAIYEDSEGKRSYTTVPLDEVAERLKQRLSPVPEKDENDVPLKFYLSPNDLVYVPTEEELQLRECKLNKDRIYKMVSSTGSECHFIPYYVANVIYNKVEFEAKNKIGRALTGEMIKAVCWKLEIDRLGNILKVIK

SEQ ID NO: 620 - protein, 593 aa, Prevotella sp.
MNTRILGLDTGTNSLAWAVVDRDAKGNYTLVRRGDVIFTEGVNVDGQPVPSKAAVKSKYKSLRVQYARRRLRKIDTLKVLVSLDLCPYLSDQQLSQWKAKKTYPLTDDFMLWQRSGSAEENNPYYCRYRCLTQKLDLTDQSQRFLLGRAFYHLAQRRGFLSNRLDTTSDSAESGKVKSGIAQLSVEMEKAGCTFLGEYFYQLYKQHGNTVRLRSRYTDREEHYIKEFLAICEKQELDAQWVEKLQRALYFQRPLKSQRKGVGKCTFEPKKPRCAESHPDYEAFRMLCILNNIKIKTPKDVSLRPLNAEEREKVWPLFFRKSKPNFDFEDIAKALAGKNNYAWYKDAGEKPFRFNYRMHQGVSGCPVTAQLIDIFGSDWKAGIAETYTAVGKKNGTKTIDEMADDVWNVLYSFSSKDKLKAFATDKLQLDEARATKFANAKLPHGFAALSLKAIRNILPFLRQGFIYAHAVLLAKIPDIVTAAVWDDADKREQILSGLLEVIENYNPDDRGIEGTIDFCIKSHLQDVVDLRPGAADALYHPSMIEAYPDAKLNKMGVFQLGSPRTNAIRNPMAMRSLHILRSVVNLLLRDGMLS

SEQ ID NO: 621 - protein, 1424 aa, Prevotella sp.
MTQKVLGLDLGTNSIGSAVRNLDLSDDLQWQLEFFSSDIFRSSVNKESNGREYSLAAQRSAHRRSRGLNEVRRRRLWATLNLLIKHGFCPMSSESLMRWCTYDKRKGLFREYPIDDKDFNAWILLDFNGDGRPDYSSPYQLRRELVTRQFDFEQPIERYKLGRALYHIAQHRGFKSSKGETLSQQETNSKPSSTDEIPDVAGAMKASEEKLSKGLSTYMKEHNLLTVGAAFAQLEDEGVRVRNNNDYRAIRSQFQHEIETIFKFQQGLSVESELYERLISEKKNVGTIFYKRPLRSQRGNVGKCTLERSKPRCAIGHPLFEKFRAWTLINNIKVRMSVDTLDEQLPMKLRLDLYNECFLAFVRTEFKFEDIRKYLEKRLGIHFSYNDKTINYKDSTSVAGCPITARFRKMLGEEWESFRVEGQKERQAHSKNNISFHRVSYSIEDIWHFCYDAEEPEAVLAFAQETLRLERKKAEELVRIWSAMPQGYAMLSQKAIRNINKILMLGLKYSDAVILAKVPELVDVSDEELLSIAKDYYLVEAQVNYDKRINSIVNGLIAKYKSVSEEYRFADHNYEYLLDESDEKDIIRQIENSLGARRWSLMDANEQTDILQKVRDRYQDFFRSHERKFVESPKLGESFENYLTKKFPMVEREQWKKLYHPSQITIYRPVSVGKDRSVLRLGNPDIGAIKNPTVLRVLNTLRRRVNQLLDDGVISPDETRVVVETARELNDANRKWALDTYNRIRHDENEKIKKILEEFYPKRDGISTDDIDKARYVIDQREVDYFTGSKTYNKDIKKYKFWLEQGGQCMYTGRTINLSNLFDPNAFDIEHTIPESLSFDSSDMNLTLCDAHYNRFIKKNHIPTDMPNYDKAITIDGKEYPAITSQLQRWVERVERLNRNVEYWKGQARRAQNKDRKDQCMREMHLWKMELEYWKKKLERFTVTEVTDGFKNSQLVDTRVITRHAVLYLKSIFPHVDVQRGDVTAKFRKILGIQSVDEKKDRSLHSHHAIDATTLTIIPVSAKRDRMLELFAKIEEINKMLSFSGSEDRTGLIQELEGLKNKLQMEVKVCRIGHNVSEIGTFINDNIIVNHHIKNQALTPVRRRLRKKGYIVGGVDNPRWQTGDALRGEIHKASYYGAITQFAKDDEGKVLMKEGRPQVNPTIKFVIRRELKYKKSAADSGFASWDDLGKAIVDKELFALMKGQFPAETSFKDACEQGIYMIKKGKNGMPDIKLHHIRHVRCEAPQSGLKIKEQTYKSEKEYKRYFYAAVGDLYAMCCYTNGKIREFRIYSLYDVSCHRKSDIEDIPEFITDKKGNRLMLDYKLRTGDMILLYKDNPAELYDLDNVNLSRRLYKINRFESQSNLVLMTHHLSTSKERGRSLGKTVDYQNLPESIRSSVKSLNFLIMGENRDFVIKNGKIIFNHR

SEQ ID NO: 622 - protein, 241 aa, Prevotella sp.
QAVKEKIKEAIAGKNFKTAIAEPIFMNKEKGIRINKVRYYVKAQERLKIRQQRDLSSKEYKQFFCVENESNYLLAIYEGELKGKKERDFCVVNNLDSAACLKRSNKGKAAPLVPERSEERNLPLLAVLKRGTQVLFYENSPEEILFDNPQDLVRRLYKVTGINTKKDVKNGKTYLYGNIELRFHQNAQKKDDVKMQSGVYKNNEVLRQGIVLSHKQFKALVEGVDFEFNVLGEIKKKERHA

SEQ ID NO: 623 - protein, 1216 aa, Prevotella stercorea
MTKILGIDTGTNSLGWAIVDKTADNYNLLDKGVNIFQEGVKIEKGIESSKAAERTEHRATRVRYYRIKLRKIRLLRILSDNHLCPPLSQEELSTWRLKKVYPKNELFMQWQRTDDDTEKTPYAYRHKCIHEKLDLSDVTDRYILGRAFYHIIQRRGFLSNRKEQGGEDSGKVKEGISTLTHEMNEAGYEYLGDYFYALYNKGEKIRKHYTARNEHFLSEFKAICEKQDLEKELGSEVVRNIEKAIFDQRPLKSQKGQVGKCVFEKNKTKCPSSHPMYEEFRMLTFINNIKIKTPNDDVLRPLNTGEREKIMPLFFRKSKKQFDFEDITKKLAPKKMYGFYKKEEDAEMPFLFNYPMDTSVSGCPVTAALKDVFGDDWITAICETYTLGEGKSRFDIVNDIWHALYFYSDKDKLAEFAINRLQLSEDEAKIFSEISLPADYASLSLKAICKILPYLRRGLIYSHAVFLGNLCEVMPKYEWSIKEMRETIIDNIIMEMDKCDTKDKRTFEVCIKDYLKGQYNVSDNSLKKLYHPSMIETYPRVQYTNEHGVYQLGSPRIDSVRNPMAMRSMFRLRKLVNRLLVEGKIDQNTEVHIEFARELNDANKRNAIALFVKENQSANDEARKQIITLFKKETGTDIEPTDKDILKYVLWEEQNHICLYTGKQIRISDFIGANPKFDIEHTIPRSVGGDSTKMNLTLCDSRFNREVKKTKLPVELPNHDEIMERIKEWKKNYELLDIQIRKNKKLSKGATTKEQKDTIIRKRHLLELRRDYWRGKYERFTMESVPEGFSRRQGTDISVISKYARLYLKSLFNRVYTVKGIATSDFRKIWGIQDIYSKKERINHVHHCIDAIVIACIGLDEYNKLGAYYHDEENNKWYGMSKASFKKPWATFVEDIKKIQDEILVYHYTPDNMPKQGRRRIKIDGKKILCKGDAARGSLHNDTYYGAIENDGAVKYVKRIDLASLEEKDVKNIVDDTVRSIIEAAIKEKGFKDAMASTIWMNEEKRVPIKKVRCFTPSITKPLNIRKQRDVSIKEYKQQYHVANDSNYLLALYIGTDNKGKEKREFEIVNILQAAQYYRTSNDKEVVDRHIVPIKSEHDYPFAYTLKIGTMVLLYEKSPNEVWDATIKERNRRLYKVTGLSTMRMKGRNGEYAYATVKLIHNEEARPSKDIKAKNGEYEQGEEFRPAIIMLHTQLNALVQGYDFEINELGEIRRLR

SEQ ID NO: 624 - protein, 1487 aa, Prevotella timonensis; identical to SEQ ID NO: 135

SEQ ID NO: 625 - protein, 770 aa, Pseudoramibacter alactolyticus
MAKGYFASDEEIDFSGVDDGFKNTLSSHQKFKEIFDVEVLNDWQKSMSEKIIFWATVYGDSKKFLKERLEDAYGNELDQKQIKRILGLRFKDWGRLSEAFLNLEGKNSKTNQSQTIIEALWNGDGTNNFNLMELLSSQFTYRDTLKKRALKGEKTLTNITYEDLSDLYLSPSVRRMVWQTILIVKELRQVLGAGPAKIFIEMARDVTLKAGTRTTSRRQQLLDLYKNVQTESRNWVEEIETQEESRFRSKKIFLYYTQMGQCMYTGEPIVFKDLFNRNLYDIDHIYPRHFVKDDSLINNLVLVKKQANSHKSDTFPIENSIQQARRDFWKWLSEKGLISREKFNRLTRRTSFSDEELAGFISRQIVETRQGTKAVAQIFENALPDSEVVYVKAGNVSDFRHHFNLLKCREINDLHHAQDAYLNVVVGNVYHTKFTKNPINFIKGYRKDRKAYAYHMDQIFDHPVKRNDIIAWQTDKNQSIATVKKVMAKGTPLVTRMSYEEHGELSNQNICSAKAAQKAEGKGYLPIKNSERLSNTQRYGGYNKYAGSYFFLVEHTLKKNRVRTIETMPLFLRDTIKTSKDLLKYCCESLKLEAPSIRVMKIKMGSLLSVNGAFVYLTGRSGKKLITPNGFQLILPQKWQDYIRLLIKTKDSPDDVEGISGGKNIEFYDILVEKHTKTCLKNRPNPIGEKLREWRNDFIALDNQKQSDILLEILKLTTFDNSGADLRAIGGKNQSGVSTIGKKISSQKSVVLVHRSVTGIFEKQVDLLSI

SEQ ID NO: 626 - protein, 103 aa, Rhizobium etli
MSGEQLTREIGRSGVKASAVGLGTWAIGGWMWGGTDEAQSIAAIQASLDAGVTLIDTAPAYGLGRSEEIVGKALAGRRDKAVIATKCGLVWHTQKGNHFFDQD

SEQ ID NO: 627 - protein, 1059 aa, Rhodovulum sp.
MGIRFAFDLGTNSIGWAVWRTGPGVFGEDTAASLDGSGVLIFKDGRNPKDGQSLATMRRVPRQSRKRRDRFVLRRRDLLAALRKAGLFPVDVEEGRRLAATDPYHLRAKALDESLTPHEMGRVIFHLNQRRGFRSNRKADRQDREKGKIAEGSKRLAETLAATNCRTLGEFLWSRHRGTPRTRSPTRIRMEGEGAKALYAFYPTREMVRAEFERLWTAQSRFAPDLLTPERHEEIAGILFRQRDLAPPKIGCCTFEPSERRLPRALPSVEARGIYERLAHLRITTGPVSDRGLTRPERDVLASALLAGKSLTFKAVRKTLKILPHALVNFEEAGEKGLDGALTAKLLSKPDHYGAAWHGLSFAEKDTFVGKLLDEADEERLIRRLVTENRLSEDAARRCASIPLADGYGRLGRTANTEILAALVEETDETGTVVTYAEAVRRAGERTGRNWHHSDERDGVILDRLPYYGEILQRHVVPGSGEPEEKNEAARWGRLANPTVHIGLNQLRKVVNRLIAAHGRPDQIVVELARELKLNREQKERLDRENRKNREENERRTAILAEHGQRDTAENKIRLRLFEEQARANAGIALCPYTGRAIGIAELFTSEVEIDHILPVSLTLDDSLANRVLCRREANREKRRQTPFQAFGATPAWNDIVARAAKLPPNKRWRFDPAALERFEREGGFLGRQLNETKYLSRLAKIYLGKICDPDRVYVTPGTLTGLLRARWGLNSILSDSNFKNRSDHRHHAVDAVVIGVLTRGMIQRIAHDAARAEDQDLDRVFRDVPVPFEDFRDHVRERVSTITVAVKPEHGKGGALHEDTSYGLVPDTDPNAALGNLVVRKPIRSLTAGEVDRVRDRALRARLGALAAPFRDESGRVRDAKGLAQALEAFGAENGIRRVRILKPDASVVTIADRRTGVPYRAVAPGENHHVDIVQMRDGSWRGFAASVFEVNRPGWRPEWEVKKLGGKLVMRLHKGDMVELSDKDGQRRVKVVQQIEISANRVRLSPHNDGGKLQDRHADADDPFRWDLATIPLLKDRGCVAVRVDPIGVVTLRRSNV

SEQ ID NO: 628 - protein, 1405 aa, Riemerella anatipestifer
MKTILGLDLGTNSIGWALVKEAENSNEKSEIIKLGVRVNPLTVDEKTNFEAGRPLSTNADRTAKRSARRNLQRYKLRRKNLIDLLIKNQLIDKDTPLTEIGKNTTHQTLELRAKAARERIELEDLARVFLAINKKRGYRSSRKVNNEEEGQAVDGMAVAKKLYDENLTPGQYAYELLSKGKKYVPDFYRSDLQAEFNAIWEYQKQFYADILDDELYNALKGQGQQNSRKRFLAIKGVYTAENKGKRDDVKLRHYKWRSEAISKKINIEEVAYVLVEINNDLNKSSGYLGAISDRSKELYFNKETVGENLWKQIQKNPHTSLKNQVFYRQDYLDEFEQIWETQAQFHPQLTLALKEQIRDVIIFYQRKLKSQKGLLSFCQFESWEIERKDENGNVILNKTTQLPKRQTVGRRVAPKSSPLFQEFKIWQNINNLEVTKISEGASKNKKETETLSDDERKLLFEELNLRGNLSQKEVLQILGLKDKEYKTNFSEGLEGNRTNAALFNIYQQIAENEGYGFDWSKKSAQEIKEELKAVFPQIGIQADILDFNANLDGKEFENQASYQLWHLLYSAEEDDKINEEDQIIYGNSAVSLKKKLCEKFGFTPEYAKWIANVSLQDDYGNLSTKAMRKIIPYLIDGNDYSEACALAGYNHSNSLTKEENDNRELLDKLELLPKNSLRNPVVEKILNQMVNVVNQVIETYGKPDEVRIELARELKKSAEKRAEMTKSINEATRRNEDIKKLITKDFGIPNPTKSDVVRYRLWEELAPLAYKDVFTGKQIKKEDLFSSKIDIEHIIPKALLFDDSFSNKTLVFRETNLKKADRTAYDFIESDYNATLDDYIQRVETLYNNTKGTISKGKRNKLLMAQKNLPDGFIERDLRNSQYIAKKAKAMLYQVFKDVNVTSGSITDRLREDWDLINVMKELNFPKYKALGLTEIEERYDIGQEKTKRVEVITDWTKRNDHRHHAMNALTVAFTTSSHIQYLNYLNARKNESHKEHKNIKGIENKITHKQKDKRKFIPPMPNFREEAKKHIETILVSIKNKNKVYTKNINKTKKKSGHNTKEQLTPRGQLHKETVYGKSKRPMSKPTKINKNFSLEQAQLIINVQEKELVLRHLAQFDNNPAVAFDTKTLKKMPLLKNGEPLKEVLCFEEIFTIRKDITPDLKIEKVVDEKIKAILEQRKKDFGGNAKEAFSDLDKNPIWLNKKKGICIKRVTITGVSNAEALHHQKDHLGREILDDNGNPIPADFVSTGNNHHLAVYLDSEGKLQDNIVSFYEAVVRTSQGLPVVDKGLNKDLGWKFLFSLKQNEMFVFPNDDFDINDFDLLDDKKAELISKHLYRVQKISKVSAGNSFVRDIVFRHHLETTVKEVKELKDISYIQLKSLEGLRNIKKVRINHIGKIVQVGEY

SEQ ID NO: 629 - protein, 1145 aa, Riemerella anatipestifer
MKTILGLDLGTNSIGWALVKETENSNEKSEIIKLGVRVNPLTVDEKTNFEAGRPLSTNADRTAKRSARRNLQRYKLRRKNLIDLLIKHRLIDKDTPLTEIGKNTTHQTLELRAKAARERIELEDLARVFLAINKKRGYRSSRKVNNEEEGQVVDGMAVAKKLYDENLTPGQYAYELLSKGKKYVPDFYRSDLQAEFDSIWEYQKQFYADILDDELYNALKGQGQQNSRKRFLAIKGVYTAENKGKRDEVKLQHYKWRSEAITQKLSIEEVAYVLVEINNDLNKSSGYLGAISDRSKELYFNKETVGENLWKQIQKNPHTSLKNQVFYRQDYLDEFEQIWETQAQFHPQLTLALKEQIRDVVIFYQRKLKSQKGLLSFCQFESWEIERKDENGNVILNKTTQLPKRQTVGRRVAPKSSPLFQEFKIWQNINNLEIAKISDGNSKNKKETEALSDDERKLLFEELNLRGNLSQKEVLQILGLKDKEYKTNFPEGLEGNRTNAALFNIYQQIAENEGYGDWTKKSAQEIKEELKAVFPQIGIQADILDFNAELDGKEFENQASYQLWHLLYSAEEDDKINEEDQIIYGNSAVSLKKKLCEKFGFTPEYAKWIANVSLQDDYGNLSTKAMRKIIPYLIDGNDYSEACALAGYNHSNSLTKEENDNRERLNKLELLPKNSLRNPVVEKILNQMVNVVNQVIETYGKPDEVRIELARELKKSAEERAEMTKGINEATRRNEDIKKLITKNFGIPNPTKNDVVRYRLWEELAPLAYKDVFTGRQIKKEDLFSSKIDIEHIIPKALLFDDSFSNKTLAFRETNLKKADRTAYGFIESDYNATLDDYIQRVETLYNNAKGTISKGKRNKLLMAQKNLPDGFIERDLRNSQYIAKKAKSMIEKVFNDVNVTSGSITDRLREDWDLINVMKELNFPKYKALGLTEIEERYDIGQEKTKKVEVITDWTKRNDHRHHAMDALTVAFTTKSHVQYLNNLNTIHSLKGDEVDLELSKLYGLKNTITEVVNKKRKFIPPMPNFREEAKKHIETILVSIKNKNKVYTKNINKTKKESGYHTKEQLTPRGQLHKETVYGKSKRPMNKPTKINKNFSLEQAQLIINVQEKELVLRHLAQFDNNPAVAFDTKTLKKCHYLKMVNL

SEQ ID NO: 630 - protein, 1400 aa, Riemerella anatipestifer
MKTILGLDLGTNSIGWALVKETENSNEKSEIIKLGVRVNPLTVDEKTNFEAGRPLSTNADRTAKRSARRNLQRYKLRRKNLIDLLIKHRLIDKDTPLTEIGKNTTHQTLELRAKAARERIELEDLARVFLAINKKRGYRSSRKVNNEEEGQVVDGMAVAKKLYDENLTPGQYAYELLSKGKKYVPDFYRSDLQAEFDSIWEYQKQFYADILDDELYNALKGQGQQNSRKRFLAIKGVYTAENKGKRDEVKLQHYKWRSEAITQKLSIEEVAYVLVEINNDLNKSSGYLGAISDRSKELYFNKETVGENLWKQIQKNPHTSLKNQVFYRQDYLDEFEQIWETQAQFHPQLTLALKEQIRDVVIFYQRKLKSQKGLLSFCQFESWEIERKDENGNVILNKTTQLPKRQTVGRRVAPKSSPLFQEFKIWQNINNLEIAKISDGNSKNKKETEALSDDERKLLFEELNLRGNLSQKEVLQILGLKDKEYKTNFPEGLEGNRTNAALFNIYQQIAENEGYGDWTKKSAQEIKEELKAVFPQIGIQADILDFNAELDGKEFENQASYQLWHLLYSAEEDDKINEEDQIIYGNSAVSLKKKLCEKFGFTPEYAKWIANVSLQDDYGNLSTKAMRKIIPYLIDGNDYSEACALAGYNHSNSLTKEENDNRERLNKLELLPKNSLRNPVVEKILNQMVNVVNQVIETYGKPDEVRIELARELKKSAEERAEMTKGINEATRRNEDIKKLITKNFGIPNPTKNDVVRYRLWEELAPLAYKDVFTGRQIKKEDLFSSKIDIEHIIPKALLFDDSFSNKTLAFRETNLKKADRTAYGFIESDYNATLDDYIQRVETLYNNAKGTISKGKRNKLLMAQKNLPDGFIERDLRNSQYIAKKAKSMIEKVFNDVNVTSGSITDRLREDWDLINVMKELNFPKYKALGLTEIEERYDIGQEKTKKVEVITDWTKRNDHRHHAMDALTVAFTTKSHVQYLNNLNTIHSLKGDEVDLELSKLYGLKNTITEVVNKKRKFIPPMPNFREEAKKHIETILVSIKNKNKVYTKNINKTKKESGYHTKEQLTPRGQLHKETVYGKSKRPMNKPTKINKNFSLEQAQLIINVQEKELVLRHLAQFDNNPAVAFDTKTLKKMPLLKNGEPLKEVLCFEEIFTIRKDITPDLKIEKVVDEKIKAILEQRKKDFGGNAKEAFSDLDKNPIWLNKEKGICIKRVTITGVSNAEALHHQKDHLGREILDDNGNPIPADFVSTGNNHHVAIYEDEKGKLQEKVVSLYEAVARANQGLPVVDKGLNEDLGWKFLFTMKQNEMFVFPNDDFDVNDIDLLDENNAKIISQHLFRVQKLATKNYMFRHHLETNVQEVKELNDIAYKSIRSTEPLKNIKKVRINHIGKIVQVGEY

SEQ ID NO: 631 - protein, 1128 aa, Roseburia intestinalis
MDEKMDYRIGLDIGIASVGWAVLQNNSDDEPVRIVDLGVRIFDTAEIPKTGESLAGPRRAARTTRRRLRRRKHRLDRIKWLFENQGLINIDDFLKRYNMAGLPDVYQLRYEALDRKLTDEELAQVLLHIAKHRGFRSTRKAETAAKENGAVLKATDENQKRMQEKGYRTVGEMIYLDEAFRIGCSWSEKGYILTPRNKAENYQHTMLRAMLVEEVKEIFSSQRRLGNKKATEELEEKYLEIMTSQRSFDLGPGMQPDGKPSPYAMEGFSDRVGKCTFLGDQGELRGAKGTYTAEYFVALQKINHTKLVNQDGETRNFTEEERRALTLLLFTQKEVKYAAVRKKLGLPEDILFYNLNYKKAATKEEQQKENQNTEKAKFIGMPYYHDYKKCLEERVKYLTENEVRDLFDEIGMILTCYKNDDSRTERLAKLGLVPIEMEGLLAYTPTKFQHLSMKAMRNIIPFLEKGMTYDKACEEAGYDFKADSKGTKQKLLTGENVNQTINEITNPVVKRSVSQTVKVINAIIRTYGSPQAINIELAREMSKTFEERRKIKGDMEKRQKNNEDVKKQIQELGKLSPTGQDILKYRLWQEQQGICMYSGKTIPLEELFKPGYDIDHILPYSITFDDSFRNKVLVTSQENRQKGNRTPYEYMGNDEQRWNEFETRVKTTIRDYKKQQKLLKKHFSEEERSEFKERNLTDTKYITTVIYNMIRQNLEMAPLNRPEKKKQVRAVNGAITAYLRKRWGLPQKNRETDTHHAMDAVVIACCTDGMIQKISRYTKVRERCYSKGTEFVDAETGEIFRPEDYSRAEWDEIFGVHIPKPWETFRAELDVRMGDDPKGFLDTHSDVALELDYPEYIYENLRPIFVSRMPNHKVTGAAHADTIRSPRHFKDEGIVLTKTALTDLKLDKDGEIDGYYNPQSDLLLYEALKKQLLLYGNDAKKAFAQDFHKPKADGTEGPVVRKVKIQKKQTMGVFVDSGNGIAENGGMVRIDVFRVNGKYYFVPVYTADVVKKVLPNRASTANKPYSEWRTMEDKDFLFSLYSRDLVHIKSKKGIPIKNVDGSLGESKEVYAYYIGADISGAKIEGKAHDSRYTFRGIGVQKLELIEKCQVDILGHISTVKNEKRMGFS

SEQ ID NO: 632 - protein, 1471 aa, Scardovia wiggsiae
MGYKAPRNDKGEIDYGVGLDLGNGSVGWVAMDKDYHLIRARGHELIGARLFDPANSAENRRESRTTRRRLSRRRWRLRMLDSLFASELAKIDPNFLARRKYSWVHPKDEQNHENWYGSIIFGSKEQDKQFYKDYPTIYHLRKKLTEDTERHDIREIYVAIHHIVKYRGHFLREGEINSENLFDPEGFVELIKDVIKLNNSYDESTPIFEASPADVSEALLNEHTSRSGRIEDTLDKLDFSVSRVDKHELKGMRDAAKAVIGAIVGNTADFSKIFNLDNLDKDSKDNLKLKFADSNFDEKYGGVVGSGLLDETQIELVDRIHAVYDAVALKGILGDAHTISEAKVESYEKHRKNWKLIKEELRTKENKDEVDLWYGDLSGRQYKNPPDPEKGPDEGSKKDSPIRDSDQKQNLIKKANDYFTELIDDSQLSEEQKNCLKNDINNGQLFPVQRSSDNGVIPYQIHLNELRRIIENQKQYYPFLAETFIRKTAEGKSYEENKIVALLKFRVPYYVGPLVSKEDMEEHSSGNSAYHWMARNPGRGEAITPWNFDEVVDKDESGARFISRLTGTDTYLLGEPTLPQHSLLYEEYMVLSELNNVRLNVRQGNHWSDKNRQRLSYKQKEFLIENLFKEHKTVTRKRAEDCLSSMGCGEVQLFGLSDEKKFASSLSSYITLKKILGKAFVDDSGNSAILERIIEVQTVFEDREPLTHQLSLIDSLTVEQRKQLAKIHYTGWGKLSRKLLTSKKGSYKIHSQNEIMRTQHSIIDIMRGDSLNLIEIIRDKKIGIGEWIDNENLDRETGESDVSRLESVFEGIVMSPRVKRGVVQAVRVIDDLAKAIGNPPQRIFIEMADEVQASQRTVSRLSRLKALYGSPSLQKEFNDLKDLRKSLNETKDADLQEDRLYLYYIQLGKDLYTGKEISIDSLSSAYDIDHIVPQALTQDDSIDNRVLVSRKENARKTDSYLYTPDLIKNMRPLWGKLLAAGLMSQKKYDALTRVDDFKDREKQRFVQRSLVETRQIMKNVSTILRTYYGEDTNVVTLKSSITHDMRKYLGFPYKNRDINDYHHAQDALCISAAGQFMLNRHFVSGGEVTDGASNAYNMYLAEYLQEFRDAKARGERKRSTAFGFVVGSMSSKDDEKRTDHRTGEIVWSETNAEYLRKVMNYKKMLITQKVGDVKTRALYDETRYGHKESSAKSIKFDNLRRDTSLYGGFSGASTAYMMLVEYKKKNKLVSITAQEASLLAVADQKNDTVSVMDGILASHGLSGAKILLPKIVTGQLLDYSDALVTLQSASELNTARQMWLPRNDYNDIDIILKSKDIEDAAHKLGYDSDTVHVLRRIQKLFEAVFRVAESQFPLHQLSKDQQEEILRDPQNYGFGSAVKLLGGLLKALHANAENTNLAGLVKVLHGDKEYSDDGKAKEFKKFGFSPRWRRISNPTGFTLSDSDTFIYQSPSGIFEQRVTVKELKEKADKQK

SEQ ID NO: 633 - protein, 116 aa, Sphingobacterium spiritivorum
MFRKYFEEKNSARLLFTLKQGDFVYVPDDNEEVILDESSPLFIDYWKNISERSNNIHVVQKFSGKEIYFLKHTIADTIAKKIEFGSQDCYQSLNGKSIKEFCIKIDSDRLGNISKV

SEQ ID NO: 634 - protein, 1306 aa, Sphingobacterium spiritivorum; identical to SEQ ID NO: 98

SEQ ID NO: 635 - protein, 1110 aa, Sphingobium sp.
MAEGKKRIWRLGADLGANSLGWAAIELSAPVNGKPIAILAAGSRIFSDGRDPKSGASLAVDRRDARAMRRRRDRFKQRQKALIKYLIADGLFPADEAARNAMAAIDPYAVRARALDEALSLPELGRALFHLNQRRGFKSNRKADRKADDDAGKIAIGIDRTRDAIAEDEADAGAEPGSWTFGKWLHERRLKGQSVRTRLRPESGEDAKGDGYDFYPDRALMEEEFDAIWAAQAPHHPDVLTNDVHDRLHEIIFYQRPLKAPQVGMCSLIPGDRRLPKAHPLFQRRRLLEELNALMIVRPGEVAQRLTREERDILLLKLKDKNKVSFATLRKALKLDPDARFNKESEDRTDLKGDEVAAVMGSKTRFGNLWVHLSIEAQWDVLARLDAVESDAEDAAFCAWLVETYALTPEQARAVANAPLPPGYGRFGETATRKLIEALRDGKKDDRVLVYSEAVTEAGLGHHSDRRTGEVFEDAKGRPQLPYYGVALERHIMPGTGDPSDPEEMRVGRLTNPTVHIGLNQLRRILNVLIRAYGPPAEIAIELARELKLTDEDKKRINRENNDNRIAAERRSEKLLAIGQADSGANRALLKLWEELNPANVLDRRCIYSGRQISIDMLFSAAVEVDHILPFAATLDDSNGNKIVCLREANREKRKRSPHDAWGHSARWDEIAARAAQLPRNKRWRFEPDAMDKFRDEGGFQARHLVDTQYLARLSREYLATLYPEKGEGSGHIWVSPGRLTEMVRRKLGLNDLLPDHNFGGGADQAKNRLDHRHHAIDAVVVAIVDRGMLNAIARASGQEGAEGRERIIIPEPWDGFRDALRETVNRITVSHRTDHGTASKAGLPKGKDATAGRLHNDTAYGFTGDTDAKGNSIVVRRVPLSSFKKLADLDRIRDADLKAALYQHLNGLEGKAFEKALAEFHKLEWHNFGGVRRVRVTEPLTVIPIKDRNGRIYKGYKGDSNYRYDVWELPDGKWVTNWKNEAGEAMSSVISMFDAHQSSEPPRPHPAARKILSLHQNDLLAIEREGEDRKLMRVVKFGQSGQITLAEHQQAGDLKKRDAVSNDDDPFKYFAPTSGGLKKVKARQVRIDEIGRVLDPGFPARTARRKTRG

SEQ ID NO: 636 - protein, 1084 aa, Sporolactobacillus vineae
MKYSIGLDIGISSVGWSVINLDRERIELMGARLFDAAENPKNGSSLAAPRRDARSARRRLRRRRYRVGRVRHFIIDRGLVTRGQADQLFDWKDGDLDIWLVRVNALERLLTDREFARVLIHIAKNRGYRSNRKSEAKSGENGQVLSAIKANKELMEEKGYQTVAEMLVNEPETFAGRKRNRGGEYTHVIARSELEHEIRLIFTKQRAFGNRFATEENENTYVKIWAAQRPVATKDDILKKIGDCTFEKGEKRAPKASYAFQYFRALDKLNRLRILSVREPSRNLTDDERNLIVPALFNHDKQKYSDLRKILQLRDDQKFNELFYDPGKSLKENENKTFLSLAEQYKIRKVIRDVQGKDGLLQYRPLDIDTIAYALTVFKDDQDTRDYLSNTFVNGNGKQVLNLANRAFDAELIDGLLSLSFAKFGHLSLKALHKLIPHMEQGLSYYDACKKVGYHDNEQVGKSKQHLLPVIPADEIRNPVVVRSLSQTRKVINAIIKRYGSPTFMYIELAREMGRPYNERRDLEKQYNKNRTVNDSAIEQIHELYPEIGAPRGHDILKYKLWQQQDCKCAYSLEKIPAEKIFEPGYAEVDHIIPYSRSFDDSNSNKVLVLSRMNQEKKNRTPYEWFGGDEHRWNKFESYVNALKVNRKKKSLLTKKNMDTEEEDTFKSRHLNDTRYITRFIKSFVEDNLLFREIEGAKQHVFTVNGAYTSLMRKRWGFNKNREESDLHHSVDAVIIAVSQPFRNEVSRYFKHREISLPQLLKRTWDYFPEPWEGFVKELRARTLQDPEKLKLALESLDLDSYDPEFIDEVKPIFISRMPKRSIKGQIHDETLRRNRGKTKDGFVKIVTRTRLENIKFDKNGDFPMYGRESDPKTYQAIKQRYLENNKDKKKAFIEPLYKPAKNPNNASLIRSVKIEDKANQIVPLRDEAVAYNASIVRTEVYRNKETGKFYLAPVYVSDVFAGREPRRFIRANVPYEQWVNITDKFTFLFNLYPNDVIYIKMKKVKTTKSNINKTISWQESYFYFKGTDIHTGAITIIDHMNSFTDRVGTQGLQLFEKYQVDPLGNLSRVHGETQYGVPALSHS

SEQ ID NO: 637 - protein, 475 aa, Staphylococcus massiliensis
MGQDYILGLDIGITSVGYGLIDYHDKSVIDAGVRLFKEANVENNEGRRSKRGSRRLQRRRKHRLARTRNLLESYQLNPFPKCEKNPYEIRVKGFKEVLTSDELSAALLHLAKRRGIDNVHVTDTESDSSDNGLSTKEQLAKNQKALESRYVCELQLERLLNDNKVRGANNRFKTQDFVREAKQILSIQKDHHNLDQVFIDKYISLLETRREYYEGPGKGSPYGWDGDIKKWYELLMGRCTYFPESLRSVKYAYSADLFNALNDLNNLVIVRDENDKLTYPEKYHIVENVFKQRKKPTLKQIAKEIDVAPEDIRGYRVTASGTPVFTSFKLYHDIKSVTSNDKVLEDTELLDAIAEVLTIYQSPIEVQEKLESLNVILTKEEIEGISKLTGYTGTHALSLKAIQIVIDELWETNDNQMTIFTRLNMKPQKVDLAKANKIPTSLVEDFIISPVAKRAFIQSIKVINAVIKNMVCLKI

SEQ ID NO: 638 - protein, 581 aa, Staphylococcus massiliensis
MPKDIIIELAREKNSDEERKIIRDVQKRNQQTRDLVDKVIKETGKTKAKGMVEKLILHDKQEGKCLYSLKSIPLEDLLNNPHHYEVDHIIPRSVSYDNSMNNKVLVLQEENSKKSNQTPFQYFNSSNTHITFKQFKQHVLNLSKTKDRITKKKKEYLLEERDINKFSVQKEFINRNLVDTRYATRELMTLLRAYFSANELDVKVKAINGGFTSYLRKRWDFKKDRNAGYKHHAEDALIIANVDFIFKQLKALDNAKKVMEGRKVQVEKDNVEDNEHYESLFREPDQIKEIKLYDNYKFSHRVDKKPNRELINDTIYSTRKVDNKTYTIQTVNNIYDKQNDQLKKLFNKSPEKFLMYKHDPKTFDKLATIMRQYKNEKNPLYKFHDETGEYLTKYAKKDNGPIVKSLKYIGKQVNAHLDITNDYENSNNKVVKLSLKPFRFDVYLDDGKYKFVTVKYLDIIKKDTYYVIDEEKYKLALQQKKISENAKFIGSFYNNDLIKINGELLRVIGVNDDAKNTLELNMIDISYRDYVENMNLATTPRIRKNIGKSITILEKYTTDILGNTFKISSPEKPQFIFKVRD

SEQ ID NO: 639 - protein, 1334 aa, Staphylococcus pseudintermedius; identical to SEQ ID NO: 205

SEQ ID NO: 640 - protein, 1112 aa, Staphylococcus simulans; identical to SEQ ID NO: 252

SEQ ID NO: 641 - protein, 773 aa, Streptococcus agalactiae
MNKPYSIGLDIGTNSVGWSIITDDYKVPAKKMRVLGNTDKEYIKKNLIGALLFDGGNTAADRRLKRTARRRYTRRRNRILYLQEIFAEEMSKVDDSFFHRLEDSFLVEEDKRGSKYPIFATLQEEKDYHEKFSTIYHLRKELADKKEKADLRLIYIALAHIIKFRGHFLIEDDSFDVRNTDISKQYQDFLEIFNTTFENNDLLSQNVDVEAILTDKISKSAKKDRILAQYPNQKSTGIFAEFLKLIVGNQADFKKYFNLEDKTPLQFAKDSYDEDLENLLGQIGDEFADLFSAAKKLYDSVLLSGILTVIDLSTKAPLSASMIQRYDEHREDLKQLKQFVKASLPEKYQEIFADSSKDGYAGYIEGKTNQEAFYKYLSKLLTKQEDSENFLEKIKNEDFLRKQRTFDNGSIPHQVHLTELKAIIRRQSEYYPFLKENQDRIEKILTFRIPYYIGPLAREKSDFAWMTRKTDDSIRPWNFEDLVDKEKSAEAFIHRMTNNDFYLPEEKVLPKHSLIYEKFTVYNELTKVRYKNEQGETYFFDSNIKQEIFDGVFKEHRKVSKKKLLDFLAKEYEEFRIVDVIGLDKENKAFNASLGTYHDLEKILDKDFLDNPDNESILEDIVQTLTLFEDREMIKKRLENYKDLFTESQLKKLYRRHYTGWGRLSAKLINGIRDKESQKTILDYLIDDGRSNRNFMQLINDDGLSFKSIISKAQAGSHSDNLKEVVGELAGSPAIKKGILQSLKIVDELVKVMGYEPEQIVVEMARENQTTNQ

SEQ ID NO: 642 - protein, 1370 aa, Streptococcus agalactiae
MNKPYSIGLDIGTNSVGWSIITDDYKVPAKKMRVLGNTDKEYIKKNLIGALLFDGGNTAADRRLKRTARRRYTRRRNRILYLQEIFAEEMSKVDDSFFHRLEDSFLVEEDKRGSKYPIFATMQEEKDYHEKFPTIYHLRKELADKKEKADLRLVYLALAHIIKFRGHFLIEDDRFDVRNTDIQKQYQAFLEIFDTSFENNHLLSQNVDVEAILTDKISKSAKKDRILAQYPNQKSTGIFAEFLKLIVGNQADFKKHFNLEDKTPLQFAKDSYDEDLENLLGQIGDEFADLFSAAKKLYDSVLLSGILTVTDLSTKAPLSASMIQRYDEHREDLKQLKQFVKASLPEKYQEIFADSSKDGYAGYIEGKTNQEAFYKYLSKLLTKQEDSEYFLEKIKNEDFLRKQRTFDNGSIPHQVHLTELKAIIRRQSEYYPFLKENQDKIEKILTFRIPYYVGPLARGNSDFAWMTRKTDDSIRPWNFEDLVDKEKSAEAFIHRMTNNDLYLPEEKVLPKHSLIYEKFTVYNELTKVRYKNEQGETYFFDSNVKQEIFDGVFKEHRKVSKKQLLDFLAKEFEEFRIVDVTGLDKENKAFNASLGTYHDLKKILDKDFLDNPDNESILEDIVQTITLFEDREMIKKRLENYKDLFTESQLKKLYRRHYTGWGRLSAKLINGIRDRESQKTILDYLISDGRANRNFMQLINDDGLSFKSIISKAQSGSHSDNLKEVVGELAGSPAIKKGILQSLKIVDELVKVMGYEPEQIVVEMARENQTTNQGRRNSRQRYKLLEDGVKNLASDLNGDILKEYPTDNQALQNERLFLYYLQNGRDMYTGEALDIDNLSQYDIDHIVPQAFIKDDSIDNRVLVSSAKNRGKSDDVPSIDIVKARKAFWKKLLDAKLISQRKYDNLTKAERGGLTPDDKAGFIQRQLVETRQITKHVARILDERFNNKVDDNNKPIRKVKIVTLKSNLVSNFRKEFGFYKIREVNNYHHAHDAYLNAVVAKAILTKYPQLEPEFVYGDYPKYNSYKTRKSATEKLFFYSNIMNFFKTKVTLADETVVVKDDIEVNNETGEIAWDKKKHFATVRKVLSYPQVNIVKKTEVQTGGFSKESILAHSNSDKLIPRKTKDIYLDPKKYGGFDSPIVAYSVLVLADIKKGKAQKLKTVKELIGITIMERERFEKNPSAFLESKGYLNIRTDKLIILPKYSLFELENGRRRLLASAGELQKGNELALPTQYMKFLYLASRYNESKGKPEEIEKKQEFVNQHVSYFDDILQLINDFSKRVILADANLEKINKLYSDNKDNTPVDELAKNIINLFTFTSLGAPAAFKFFDKSVDRKRYTSTKEVLDSTLIHQSITGLYETRIDLGKLGED

SEQ ID NO: 643 - protein, 1370 aa, Streptococcus agalactiae
MNKPYSIGLDIGTNSVGWSIITDDYKVPAKKMRVLGNTDKEYIKKNLIGALLFDGGNTAADRRLKRTARRRYTRRRNRILYLQEIFAEEMSKVDDSFFHRLEDSFLVEEDKRGSKYPIFATMQEEKDYHEKFPTIYHLRKELADKKEKADLRLVYLALAHIIKFRGHFLIEDDRFDVRNTDIQKQYQAFLEIFDTSFENNHLLSQNVDVEAILTDKISKSAKKDRILAQYPNQKSTGIFAEFLKLIVGNQADFKKHFNLEDKTPLQFAKDSYDEDLENLLGQIGDEFADLFSAAKKLYDSVLLSGILTVTDLSTKAPLSAYMIQRYDEHREDLKQLKQFVKASLPEKYQEIFADSSKDGYAGYIEGKTNQEAFYKYLSKLLTKQEDSEYFLEKIKNEDFLRKQRTFDNGSIPHQVHLTELKAIIRRQSEYYPFLKENQDKIEKILTFRIPYYVGPLARGNSDFAWMTRKTDDSIRPWNFEDLVDKEKSAEAFIHRMTNNDLYLPEEKVLPKHSLIYEKFTVYNELTKVRYKNEQGETYFFDSNVKQEIFDGVFKEHRKVSKKQLLDFLAKEFEEFRIVDVTGLDKENKAFNASLGTYHDLKKILDKDFLDNPDNESILEDIVQTITLFEDREMIKKRLENYKDLFTESQLKKLYRRHYTGWGRLSAKLINGIRDRESQKTILDYLISDGRANRNFMQLINDDGLSFKSIISKAQSGSHSDNLKEVVGELAGSPAIKKGILQSLKIVDELVKVMGYEPEQIVVEMARENQTTNQGRRNSRQRYKLLEDGVKNLASDLNGDILKEYPTDNQALQNERLFLYYLQNGRDMYTGEALDIDNLSQYDIDHIVPQAFIKDDSIDNRVLVSSAKNRGKSDDVPSIDIVKARKAFWKKLLDAKLISQRKYDNLTKAERGGLTPDDKAGFIQRQLVETRQITKHVARILDERFNNKVDDNNKPIRKVKIVTLKSNLVSNFRKEFGFYKIREVNNYHHAHDAYLNAVVAKAILTKYPQLEPEFVYGDYPKYNSYKTRKSATEKLFFYSNIMNFFKTKVTLADETVVVKDDIEVNNETGEIAWDKKKHFATVRKVLSYPQVNIVKKTEVQTGGFSKESILAHSNSDKLIPRKTKDIYLDPKKYGGFDSPIVAYSVLVLADIKKGKAQKLKTVKELIGITIMERERFEKNPSAFLESKGYLNIRTDKLIILPKYSLFELENGRRRLLASAGELQKGNELALPTQYMKFLYLASRYNESKGKPEEIEKKQEFVNQHISYFDDILQLINDFSKRVILADANLEKINKLYSDNKDNTPVDELAKNIINLFTFTSLGAPAAFKFFDKSVDRKRYTSTKEVLDSTLIHQSITGLYETRIDLGKLGED

SEQ ID NO: 644 - protein, 1378 aa, Streptococcus agalactiae
MNKPYSIGLDIGTNSVGWSIITDDYKVPAKKMRVLGNTDKEYIKKNLIGALLFDGGNTAADRRLKRTARRRYTRRRNRILYLQEIFAEEMSKVDDSFFHRLEDSFLVEEDKRGSKYPIFATMQEEKYYHEKFPTIYHLRKELADKKEKADLRLIYLALAHIIKFRGHFLIEDDRFDVRNTDIQKQYQAFLEIFDTTFENNDLLSQNVDVEAILTDKISKSAKKDRILARYPNQKSTGIFAEFLKLIVGNQADFKKHFNLEDKTPLQFAKDSYDEDLENLLGQIGDEFADLFSAAKKLYDSVLLSGILTVIDLSTKAPLSASMIQRYDEHHEDLKHLKQFVKASLPENYREVFADSSKDGYAGYIEGKTSQEAFYKYLLKLLTKQEGSEYLLEKIKNEDFLRKQRTFDNGSIPHQVHLTELRAIIRRQSEYYPFLKENLDRIEKILTFRIPYYVGPLAREKSDFAWMTRKTDDSIRPWNFEDLVDKEKSAEAFIHRMTNNDLYLPEEKVLPKHSLIYEKFTVYNELTKVRFLAEGFKDFQFLNRKQKETIFNSLFKEKRKVTEKDIISFLNKVDGYEGIAIKGIEKQFNASLSTYHDLKKILGKDFLDNTDNELILEDIIQTLTLFEDREMIKKRLDIYKDFFTESQLKKLYRRHYTGWGRLSAKLINGIRNKENQKTILDYLIDDGSANRNFMQLIKDAGLSFKPIIDKARTGSHSDNLKEVVGELAGSPAIKKGILQSLKIVDELVKVMGYEPEQIVVEMARENQTTAKGLSRSRQRLTTLRESLGNLKSNILEEKKPKYVKDQVENHHLSDDRLFLYYLQNGKDMYTDDELDIDNLSQYDIDHIIPQAFIKDDSIDNRVLVSSAKNRGKSDDVPSIEIVKARKMFWKNLLDAKLMSQRKYDNLTKAERGGLTSDDKARFIQRQLVETRQITKHVARILDERFNNELDSKGRRIRKVKIVTLKSNLVSNFRKEFGFYKIREVNNYHHAHDAYLNAVVAKAILTKYPQLEPEFVYGLYRRKKLSKIVREDKEEKYSEATRKMFFYSNLMNMFKRVVRLADGSIVVRPVIETGRYMGKTAWDKKKHFATVRKVLSYPQNNIVKKTEIQTGGFSKESILAHGNSDKLIPRKTKDIYLDPKKYGGFDSPIVAYSVLVVADIKKGKAQKLKTVTELLGITIMERSRFEKNTSAFLESKGYLNIRDDKLMILPKYSLFELENGRRRLLASAGELQKGNELALPTQFMKFLYLASRYNESKGKPEEIEKKQEFVNQHVSYFDDILQLINDFSNRVILADANLEKINKLYQDNKENIPVDELANNIINLFTFTSLGAPAAFKFFDKIVDRKRYTSTKEVLNSTLIHQSITGLYETRIDLGKLGEG

SEQ ID NO: 645 - protein, 1370 aa, Streptococcus agalactiae
MNKPYSIGLDIGTNSVGWSIITDDYKVPAKKMRVLGNTDKEYIKKNLIGALLFDGGNTAADRRLKRTARRRYTRRRNRILYLQEIFAEEMSKVDDSFFHRLEDSFLVEEDKRGSKYPIFATMQEEKYYHEKFPTIYHLRKELADKKEKADLRLIYLALAHIIKFRGHFLIEDDRFDVRNTDIQKQYQAFLEIFDTTFENNDLLSQNVDVEAILTDKISKSAKKDRILARYPNQKSTGIFAEFLKLIVGNQADFKKHFNLEDKTPLQFAKDSYDEDLENLLGQIGDEFADLFSAAKKLYDSVLLSGILTVTDLSTKAPLSASMIQRYDEHREDLKQLKQFVKASLPEKYQEIFADSSKDGYAGYIEGKTNQEAFYKYLSKLLTKQEGSEYLLEKIKNEDFLRKQRTFDNGSIPHQVHLTELRAIIRRQSEYYPFLKENLDRIEKILTFRIPYYVGPLAREKSDFAWMTRKTDDSIRPWNFEDLVDKEKSAEAFIHRMTNNDLYLPEEKVLPKHSLIYEKFTVYNELTKVRFLAEGFKDFQFLNRKQKETIFNSLFKEKRKVTEKDIISFLNKVDGYEGIAIKGIEKQFNASLSTYHDLKKILGKDFLDNTDNELILEDIVQTLTLFEDREMIRKRLDIYKDFFTESQLKKLYRRHYTGWGRLSAKLINGIRNKENQKTILDYLIDDGSANRNFMQLIKDAGLSFKPIIDKARTGSHSDNLKEVVGELAGSPAIKKGILQSLKIVDELVKVMGYEPEQIVVEMARENQTTAKGLSRLRQRLTTLRESLANLKSNILEEKKPKYVKDQVENHHLSDDRLFLYYLQNGKDMYTDDELDIDNLSQYDIDHIIPQAFIKDDSIDNRVLVSSAKNRGKSDDVPSVEIVKDCKVFWKKLLDAKLMSQRKYDNLTKAERGGLTSDDKARFIQRQLVETRQITKHVARILDERFNNELDSKGRRIRKVKIVTLKSNLVSNFRKEFGFYKIREVNNYHHAHDAYLNAVVAKAILTKYPQLEPEFVYGDYPKYNSYKTRKSATEKLFFYSNIMNFFKTKVTLADGTVVVKDDIEVNNDTGEIVWDKKKHFATVRKVLSYPQVNIVKKTEIQTGGFSKESILAHGNSDKLIPRKTKDIYLDPKKYGGFDSPIVAYSVLVVADIKKGKAQKLKTVTELLGITIMERSRFEKNPSAFLESKGYLNIRDDKLMILPKYSLFELENGRRRLLASADELQKGNELALPTQFMKFLYLASRYNELKGKPEEIEQKQEFVVQHVSYFDDILQIINDFSNRVILADANLEKINKLYQDNKENIPVDELANNIINLFTFTSLGAPAAFKFFDKIVDRKRYTSTKEVLNSTLIHQSITGLYETRIDLGKLGED

SEQ ID NO: 646 - protein, 1377 aa, Streptococcus agalactiae
MNKPYSIGLDIGTNSVGWSIITDDYKVPAKKMRVLGNTDKEYIKKNLIGALLFDGGNTAADRRLKRTARRRYTRRRNRILYLQEIFAEEMSKVDDSFFHRLEDSFLVEEDKRGSKYPIFATMQEEKYYHEKFPTIYHLRKELADKKEKADLRLVYLALAHIIKFRGHFLIEDDRFDVRNTDIQKQYQAFLEIFDTTFENNHLLSQNVDVEAILTDKISKSAKKDRILAQYPNQKSTGIFAEFLKLIVGNQADFKKHFNLEDKTPLQFAKDSYDEDLENLLGQIGDEFADLFSVAKKLYDSVLLSGILTVTDLSTKAPLSASMIQRYDEHHEDLKHLKQFVKASLPENYREVFADSSKDGYAGYIEGKTNQEAFYKYLLKLLTKQEGSEYFLEKIKNEDFLRKQRTFDNGSIPHQVHLTELRAIIRRQSEYYPFLKENQDRIEKILTFRIPYYVGPLAREKSDFAWMTRKTDDSIRPWNFEDLVDKEKSAEAFIHRMTNNDLYLPEEKVLPKHSLIYEKFTVYNELTKVRFLAEGFKDFQFLNRKQKETIFNSLFKEKRKVTEKDIISFLNKVDGYEGIAIKGIEKQFNASLSTYHDLKKILGKDFLDNTDNELILEDIVQTLTLFEDREMIKKCLDIYKDFFTESQLKKLYRRHYTGWGRLSAKLINGIRNKENQKTILDYLIDDGSANRNFMQLINDDDLSFKPIIDKARTGSHSDNLKEVVGELAGSPAIKKGILQSLKIVDELVKVMGYEPEQIVVEMARENQTTAKGLSRSRQRLTTLRESLANLKSNILEEKKPKYVKDQVENHHLSDDRLFLYYLQNGRDMYTKKALDIDNLSQYDIDHIIPQAFIKDDSIDNRVLVSSAKNRGKSDDVPSIEIVKARKMFWKNLLDAKLMSQRKYDNLTKAERGGLTSDDKARFIQRQLVETRQITKHVARILDERFNNEVDNGKKICKVKIVTLKSNLVSNFRKEFGFYKIREVNDYHHAHDAYLNAVVAKAILTKYPQLEPEFVYGMYRQKKLSKIVHEDKEEKYSEATRKMFFYSNLMNMFKRVVRLADGSIVVRPVIETGRYMGKTAWDKKKHFATVRKVLSYPQNNIVKKTEIQTGGFSKESILAHGNSDKLIPRKTKDIYLDPKKYGGFDSPIVAYSVLVVADIKKGKAQKLKTVTELLGITIMERSRFEKNPSAFLESKGYLNIRDDKLMILPKYSLFELENGRRRLLASAGELQKGNELALPTQFMKFLYLASRYNESKGKPEEIEKKQEFVNQHVSYFDDILQLINDFSKRVILADANLEKINKLYQDNKENIPVDELANNIINLFTFTSLGAPAAFKFFDKIVDRKRYTSTKEVLNSTLIHQSITGLYETRIDLGKLGED

SEQ ID NO: 647 - protein, 1370 aa, Streptococcus agalactiae
  VARIANT 117: note = Xaa can be any naturally occurring amino acid
MNKPYSIGLDIGTNSVGWSIITDDYKVPAKKMRVLGNTDKEYIKKNLIGALLFDGGNTAADRRLKRTARRRYTRRRNRILYLQEIFAEEMSKVDDSFFHRLEDSFLVEEDKRGSKYXIFATLQEEKDYHEKFSTIYHLRKELADKKEKADLRLIYIALAHIIKFRGHFLIEDDSFDVRNTDISKQYQDFLEIFNTTFENNDLLSQNVDVEAILTDKISKSAKKDRILAQYPNQKSTGIFAEFLKLIVGNQADFKKYFNLEDKTPLQFAKDSYDEDLENLLGQIGDEFADLFSAAKKLYDSVLLSGILTVIDLSTKAPLSASMIQRYDEHREDLKQLKQFVKASLPEKYQEIFADSSKDGYAGYIEGKTNQEAFYKYLSKLLTKQEDSENFLEKIKNEDFLRKQRTFDNGSIPHQVHLTELKAIIRRQSEYYPFLKENQDRIEKILTFRIPYYIGPLAREKSDFAWMTRKTDDSIRPWNFEDLVDKEKSAEAFIHRMTNNDFYLPEEKVLPKHSLIYEKFTVYNELTKVRYKNEQGETYFFDSNIKQEIFDGVFKEHRKVSKKKLLDFLAKEYEEFRIVDVIGLDKENKAFNASLGTYHDLEKILDKDFLDNPDNESILEDIVQTLTLFEDREMIKKRLENYKDLFTESQLKKLYRRHYTGWGRLSAKLINGIRDKESQKTILDYLIDDGRSNRNFMQLINDDGLSFKSIISKAQAGSHSDNLKEVVGELAGSPAIKKGILQSLKIVDELVKVMGYEPEQIVVEMARENQTTNQGRRNSRQRYKLLDDGVKNLASDLNGNILKEYPTDNQALQNERLFLYYLQNGRDMYTGEALDIDNLSQYDIDHIIPQAFIKDDSIDNRVLVSSAKNRGKSDDVPSLEIVKDCKVFWKKLLDAKLMSQRKYDNLTKAERGGLTSDDKARFIQRQLVETRQITKHVARILDERFNNELDSKGRRIRKVKIVTLKSNLVSNFRKEFGFYKIREVNNYHHAHDAYLNAVVAKAILTKYPQLEPEFVYGDYPKYNSYKTRKSATEKLFFYSNIMNFFKTKVTLADGTVVVKDDIEVNNDTGEIVWDKKKHFATVRKVLSYPQNNIVKKTEIQTGGFSKESILAHGNSDKLIPRKTKDIYLDPKKYGGFDSPIVAYSVLVVADIKKGKAQKLKTVTELLGITIMERSRFEKNPSAFLESKGYLNIRADKLIILPKYSLFELENGRRRLLASAGELQKGNELALPTQFMKFLYLASRYNESKGKPEEIEKKQEFVNQHVSYFDDILQLINDFSKRVILADANLEKINKLYQDNKENISVDELANNIINLFTFTSLGAPAAFKFFDKIVDRKRYTSTKEVLNSTLIHQSITGLYETRIDLGKLGED

SEQ ID NO: 648 - protein, 1370 aa, Streptococcus agalactiae
MNKPYSIGLDIGTNSVGYSVVTDDYKVPAKKMRVLGNTDKEYIKKNLIGALLFDGGNTASDRRLKRTARRRYTRRRNRILYLQEIFAEEMSKVDDSFFHRLEDSFLVEDDKRGSKYPIFATMQEEKDYHEKFPTIYHLRKELADKKEKADLRLVYLALAHIIKFRGHFLIEDDSFDVRNTDIQRQYQAFLEIFDTTFENNHLLSQNIDVEGILTDKISKSAKKDRILAQYPNQKSTGIFAEFLKLIVGNQADFKKHFNLEDKTPLQFAKDSYDEDLENLLGQIGDEFADLFSVAKKLYDSVLLSGILTVTDLSTKAPLSASMIQRYDEHREDLKQLKQFVKASLPEKYQEIFTDSSKDGYAGYIEGKTNQGAFYKYLSKLLTKQEGSEYFLEKIKNEDFLRKQRTFDNGSIPHQVHLTELKAIIRRQSEYYPFLKENLDRIEKILTFRIPYYVGPLAREKSDFAWMTRKTDDSIRPWNFEELVDKEASAEAFIHRMTNNDLYLPEEKVLPKHSLIYEKFTVYNELTKVRYKNEQGETYFFDSNIKQEIFDGVFKEHRKVSKKKLLDFLAKEYEEFRIVDVIGLDKENKAFNASLGTYHDLKKILDKDFLDNPDNESILEDIVQTLTLFEDREMIKKRLENYKDLFTESQLKKLYRRHYTGWGRLSAKLINGIRDKESQKTILDYLISDGRANRNFMQLIHDDGLSFKPIIDKAQAGSHSDNLKEVVGELAGSPAIKKGILQSLKIVDELVKVMGYEPEQVVVEMARENQTTNQGRRNTRQRYKLLEEGVKNLASDLNGNILKEYPTDNQALQNERLFLYYLQNGRDMYTGEALDIDNLSQYDIDHIVPQAFIKDDSIDNRVLVSSAKNRGKSDNVPSIDIVKARKAFWKKLLDAKLMSQRKYDNLTKAERGGLTSDDKARFIQRQLVETRQITKHVARILDERFNNELDSKGRRIRKVKIVTLKSNLVSNFRKEFGFYKIREVNDYHHAHDAYLNAVVAKAILTKYPQLEPEFVYGDYPKYNSYKTRKSATEKLFFYSNIMNFFKTKVTLADGTVVVKDDIEVNNDTGEIVWDKKKHFATVRKVLSYPQVNIVKKTEIQTGGFSKESILAHGNSDKLIPRKTKDIYLDPKKYGGFDSPIVAYSVLVVADIKKGKAQKLKTVTELLGITIMERFRFEKNPSAFLESKGYLNIRDDKLMILPKYSLFELENGRRRLLASAGELQKGNELALPTQYMKFLYLASRYNELKGKPEEIEQKQEFVVQHVSYFDDILQIINDFSNRVILADANLEKINKLYQDNKENISVDELANNIINLFTFTSLGAPAAFKFFDKIVDRKRYTSTKEVLNSTLIHQSITGLYETRIDLGKLGED

SEQ ID NO: 649 - protein, 1370 aa, Streptococcus agalactiae
MNKPYSIGLDIGTNSVGYSVVTDDYKVPAKKMRVLGNTDKEYIKKNLIGALLFDGGNTASDRRLKRTARRRYTRRRNRILYLQEIFAEEMSKVDDSFFHRLEDSFLVEDDKRGSKYPIFATMQEEKDYHEKFPTIYHLRKELADKKEKANLRLVYLALAHIIKFRGHFLIEDDSFDVRNTDIQRQYQAFLEIFDTTFENNHLLSQNIDVEGILTDKISKSAKKDRILAQYPNQKSTGIFAEFLKLIVGNQADFKKHFNLEDKTPLQFAKDSYDEDLENLLGQIGDEFADLFSVAKKLYDSVLLSGILTVTDLSTKAPLSASMIQRYDEHREDLKQLKQFVKASLPEKYQEIFTDSSKDGYAGYIEGKTNQGAFYKYLSKLLTKQEGSEYFLEKIKNEDFLRKQRTFDNGSIPHQVHLTELKAIIRRQSEYYPFLKENLDRIEKILTFRIPYYVGPLAREKSDFAWMTRKTDDSIRPWNFEELVDKEASAEAFIHRMTNNDLYLPEEKVLPKHSLIYEKFTVYNELTKVRYKNEQGETYFFDSNIKQEIFDGVFKEHRKVSKKKLLDFLAKEYEEFRIVDVIGLDKENKAFNASLGTYHDLKKILDKDFLDNPDNESILEDIVQTLTLFEDREMIKKRLENYKDLFTESQLKKLYRRHYTGWGRLSAKLINGIRDKESQKTILDYLISDGRANRNFMQLIHDDGLSFKPIIDKAQAGSHSDNLKEVVGELAGSPAIKKGILQSLKIVDELVKVMGYEPEQVVVEMARENQTTNQGRRNTRQRYKLLEEGVKNLASDLNGNILKEYPTDNQALQNERLFLYYLQNGRDMYTGEALDIDNLSQYDIDHIVPQAFIKDDSIDNRVLVSSAKNRGKSDNVPSIDIVKARKAFWKKLLDAKLMSQRKYDNLTKAERGGLTSDDKARFIQRQLVETRQITKHVARILDERFNNELDSKGRRIRKVKIVTLKSNLVSNFRKEFGFYKIREVNDYHHAHDAYLNAVVAKAILTKYPQLEPEFVYGDYPKYNSYKTRKSATEKLFFYSNIMNFFKTKVTLADGTVVVKDDIEVNNDTGEIVWDKKKHFATVRKVLSYPQVNIVKKTEIQTGGFSKESILAHGNSDKLIPRKTKDIYLDPKKYGGFDSPIVAYSVLVVADIKKGKAQKLKTVTELLGITIMERFRFEKNPSAFLESKGYLNIRDDKLMILPKYSLFELENGRRRLLASAGELQKGNELALPTQYMKFLYLASRYNELKGKPEEIEQKQEFVVQHVSYFDDILQIINDFSNRVILADANLEKINKLYQDNKENISVDELANNIINLFTFTSLGAPAAFKFFDKIVDRKRYTSTKEVLNSTLIHQSITGLYETRIDLGKLGED

SEQ ID NO: 650 - protein, 1370 aa, Streptococcus agalactiae
  VARIANT 9: note = Xaa can be any naturally occurring amino acid
MNKPYSIGXDIGTNSVGWSIITDDYKVPAKKMRVLGNTDKEYIKKNLIGALLFDGGNTAADRRLKRTARRRYTRRRNRILYLQEIFAEEMSKVDDSFFHRLEDSFLVEEDKRGSKYPIFATLQEEKDYHEKFSTIYHLRKELADKKEKADLRLIYIALAHIIKFRGHFLIEDDSFDVRNTDISKQYQDFLEIFNTTFENNDLLSQNVDVEAILTDKISKSAKKDRILAQYPNQKSTGIFAEFLKLIVGNQADFKKYFNLEDKTPLQFAKDSYDEDLENLLGQIGDEFADLFSAAKKLYDSVLLSGILTVIDLSTKAPLSASMIQRYDEHREDLKQLKQFVKASLPEKYQEIFADSSKDGYAGYIEGKTNQEAFYKYLSKLLTKQEDSENFLEKIKNEDFLRKQRTFDNGSIPHQVHLTELKAIIRRQSEYYPFLKENQDRIEKILTFRIPYYIGPLAREKSDFAWMTRKTDDSIRPWNFEDLVDKEKSAEAFIHRMTNNDFYLPEEKVLPKHSLIYEKFTVYNELTKVRYKNEQGETYFFDSNIKQEIFDGVFKEHRKVSKKKLLDFLAKEYEEFRIVDVIGLDKENKAFNASLGTYHDLEKILDKDFLDNPDNESILEDIVQTLTLFEDREMIKKRLENYKDLFTESQLKKLYRRHYTGWGRLSAKLINGIRDKESQKTILDYLIDDGRSNRNFMQLINDDGLSFKSIISKAQAGSHSDNLKEVVGELAGSPAIKKGILQSLKIVDELVKVMGYEPEQIVVEMARENQTTNQGRRNSRQRYKLLDDGVKNLASDLNGNILKEYPTDNQALQNERLFLYYLQNGRDMYTGEALDIDNLSQYDIDHIIPQAFIKDDSIDNRVLVSSAKNRGKSDDVPSLEIVKDCKVFWKKLLDAKLMSQRKYDNLTKAERGGLTSDDKARFIQRQLVETRQITKHVARILDERFNNELDSKGRRIRKVKIVTLKSNLVSNFRKEFGFYKIREVNNYHHAHDAYLNAVVAKAILTKYPQLEPEFVYGDYPKYNSYKTRKSATEKLFFYSNIMNFFKTKVTLADGTVVVKDDIEVNNDTGEIVWDKKKHFATVRKVLSYPQNNIVKKTEIQTGGFSKESILAHGNSDKLIPRKTKDIYLDPKKYGGFDSPIVAYSVLVVADIKKGKAQKLKTVTELLGITIMERSRFEKNPSAFLESKGYLNIRADKLIILPKYSLFELENGRRRLLASAGELQKGNELALPTQFMKFLYLASRYNESKGKPEEIEKKQEFVNQHVSYFDDILQLINDFSKRVILADANLEKINKLYQDNKENISVDELANNIINLFTFTSLGAPAAFKFFDKIVDRKRYTSTKEVLNSTLIHQSITGLYETRIDLGKLGED

SEQ ID NO: 651 - protein, 1125 aa, Streptococcus anginosus
MNGLVLGLDIGIASVGVGILNKETGEIIHANSRIFPAATADSNVERRGFRQGRRLGRRKKHRSARLNNLFEEFGFITDFSAIPLNLNPYALRVKGLSEELTNEELFIALKNIIKRRGISYLDDASEDGETASNEYGKAVEENRKLLADKTPGQIQLERFEKYGQVRGDFTVVENGENHRLINVFSTSAYKKEAERILRRQQEFNVRISDEFIEAYLTILTGKRKYYHGPGNEKSRTDYGRFRTDGTTLDNIFGILIGKCTFYPDEYRAAKASYTAQEFNLLNDLNNLTVPTETKKLSPEQKRQIVEYARTAKTLGTPTLLKYIAKLVDGSIDDIKGYRIDKSDKPEMHTFDAYRKMRTLDLVNIDALSRETLDDLAHILTLNTESEGILEALNSKMPSTFTKEQIDELIQFRKKNSAVFGKGWHNFSLKLMNELISELYETSEEQMTILTRLGKQRSREISKRTKYIDEKELTEEIYNPVVAKSVRQAIKIINEATKRYGIFDNIVIEMARENNEEDAKKDYIKRQKANQDEKNASMEKAAFQYNGKKELPDSIFHGHKELATKIRLWHQQGERCLYTGKNISIRDLIHNPHQYEIDHILPLSLSFDDGLANKVLVLATANQEKGQRTPFQAIDSMDDAWSYREFKQYVRNSKSLSNKKKDYLLTEEDISKIEVKQKFIERNLVDTRYSSRVVLNTLQEFYKTNDFDTKISVVRGQFTSQLRRKWKIEKSRDTYHHHAVDALIIAASSQLRLWKKQNNPLISYKEGQFVDPETGEILSLTDDEYKELVFRPPYDYFVDTLKSKSFEDSILFSYQVDSKYNRKISDATIYGTRKAQLGKDKQEETYVLGKIKDIYSQKGYEDFIKRYNKDETQFLIYHKDPQTFEKVIEEILKTYPDKELNEKGKEIPCNPFEKYRQENGPIRKYSKKGKGPEIKSLKYYDNKLGNHIDITPVNSQNQVVLQSLKPWRTDVYFNPRTSKYELMGLKYSDLRFEKGSGSYGISPEKYNKVKAKEGVNEDSEFKFTLYKNDLILIKDTETGEQQLFRYGSRNDTSKHYVELKPYEKAKFEGNQQLMNLLGTVAKGGQCLKGINKPNLSIYKVKTDVLGNKYFIKKEGDQPQLNFKKKF

SEQ ID NO: 652 - protein, 1386 aa, Streptococcus anginosus
MNQKYSIGLDIGTNSVGWAVITDDYKVPAKKMKVLGNTDKQSIKKNLLGALLFDSGETAEATRLKRTARRRYTRRRNRLRYLQEIFAEEMMQVDESFFQRLDDSFLVDEDKRGERHPIFGNIAAEVKYHDEFPTIYHLRKHLADISQKADLRLVYLALAHMIKFRGHFLIEGQLKAENTNVQALFKDFVEVYDKTVEESHLSEITVDALSILTEKVSKSRRLENLIAHYPAEKKNTLFGNLIALFLGLQPNFKTNFQLSEDAKLQFSKDTYEEDLEGLLGEVGDEYADLFASAKNLYDAILLSGILTVDDNSTKAPLSASMVKRYEEHQKDLKKFEDFIKVNALDQYNAIFKDKNKKGYAGYIESGVKQDEFYKYLKGILLQINGSGDFLDKIDREDFLRKQRTFDNGSIPHQIHLQEMHAILRRQGEHYPFLKENQDKIEKILTFRIPYYVGPLARKGSRFAWAEYKADEKITPWNFDDILDKEKSAEKFITRMTLNDLYLPEEKVLPKHSLLYETFTVYNELTKVKYVNEQGEAKFFDANMKQEIFDHVFKENRKVTKDKLLNYLNKEFEEFRIVNLTGLDKENKVFNSSLGTYHDLRKILNKSFLDNKENAQIIEDIIQTLTLFEDREMIRQRLQKYSDIFTKAQLKKLERRHYTGWGRLSYKLINGIRNKENKKTILDYLIDDGYANRNFMQLINDDALSFKEEIAKAQIIGDVDDIANVVHDLPGSPAIKKGILQSVKIVDELVKVMGHNPANIIIEMARENQTTDRGRRNSQQRLKLLQDSLKNLDNPVNIKNVENQQLQNDRLFLYYIQNGKDMYTGETLDINNLSQYDIDHIIPQAYIKDDSFDNRVLTSSSENRGKSDNVPSIEVVCARKADWMRLRKAGLISQRKFDNLTKAERGGLTENDKAGFIKRQLVETRQITKHVAQVLDARFNAKHDENKKVIRDVKIITLKSNLVSQFRKDFKFYKVREINDYHHAHDAYLNAVIGTALLKKYPKLASEFVYGEFKKYDVRKFIAKSDKEIGKATAKYFFYSNLMNFFKKEVKFADGTVVERPDIETSEDGEIAWNKQTDFKIVRKVLSYPQVNIVKKTEVQTHGLDRGKPRGLFNANPSPKPKPDSSENLVGVKRNLDPKKYGGYAGISNSYAVLVKAIIEKGVKKKETMVLEFQGISILDRITFEKDKRAFLLGKGYKDIKKIIELPKYSLFELKDGSRRMLASILSTNNKRGEIHKGNELFVPQKFTTLLYHAKRINNPINKDHIEYVKKHRDDFKELLNYVLEFNEKYVGATKNGERLKEAVADFDSKSNEEICTSFLGAVNSKNAGLFELTSLGSASDFEFLGVKIPRYRDYTPSSLLKDSTLIHQSITGLYETRIDLSKLGED

SEQ ID NO: 653 - protein, 1396 aa, Streptococcus anginosus
MTKPYSIGLDIGTNSVGWAVITDDYKVPAKKMKVLGNTNRDYIKKNLLGALLFDGGETAEGRRLKRTARRRYTRRKNRLRYLQEIFAEEMMQVDESFFQRLDDSFLVEEDKQGSKYPIFGTLKEEKEYHKKFKTIYHLREELANSKEKADLRLVYLALAHMIKFRGHFLYEGDLKAENTDVQALFKDFVEEYDKTIEESHLSEITVDALSILTEKVSKSSRLENLIAHYPTEKKNTLFGNLIALSLGLQANFKTNFQLSEDAKLQFSKDTYEEDLEGLLGEVGDEYADLFVSAKNLYDAILLSGILTVDDNSTKAPLSASMVKRYKEHKEELAAFKRFIKEKLPKKYEEIFKDDTKNGYAGYVGADKKLRKRSGKLATEEEFYKYVKGILNKVEGADYFLDKIDREDFLRKQRTFDNGSIPHQIHLQEMHAILRRQGEHYPFLKENQDKIEKILTFRIPYYVGPLARKGSRFAWAEYKADEKITPWNFDDILDKEKSAEKFITRMTLNDLYLPEEKVLPKHSPLYETFTVYNELTKVKYVNEQGEAKFFDTNMKQEIFDHVFKENRKVTKDKLLNYLNKEFEEFRIVNLTGLDKENKAFNASLGTYHDLRKILDKSFLDDKVNEKIIEDIIQTLTLFEDREMIRQRLQKYSDIFTTQQLKELERRHYTGWGRLSYKLINGIRNKENKKTILDYLIDDGYANRNFMQLINDDALSFKEEIARAQIIGDVDDIANVVHDLPGSPAIKKGILQSVKIVDELVKVMGHNPTNIIIEMARENQTTDKGRRNSQQRLKLLQDSLKNLDNPVNIKNVENQQLQNDRLFLYYIQNGKDMYTGETLDINNLSQYDIDHIIPQAFIKDNSLDNRVLTRSDKNRGKSDDVPSIEVVHEMKSFWSKLLSVKLITQRKFDNLTKAERGGLTENDKAGFIKRQLVETRQITKHVAQVLDARFNAKHDENKKVIRDVKIITLKSNLVSQFRKDFKFYKVREINDYHHAHDAYLNAVIGTALLKKYPKLASEFVYGEFKKYDVRKFIAKSDKEIGKATAKYFFYSNLMNFFKKEVKFADGTVVERPDIETSEDGEIAWNKQTDFKIVRKVLSYPQVNIVKKTEVQTHGLDRGKPRGLFNANPSPKPKPDSSENLVGIKRNLDPKKYGGYAGISNSYAVLVKAIIEKGVKKKETMVLEFQGISILDRITFEKDKRAFLLGKGYKDIKKIIELPKYSLFELKDGSRRMLASILSTNNKRGEIHKGNELFVPQKFTTLLYHAKRINNPINKDHIEYVKKHRDDFKELLNYVLEFNEKYVGATKNGERLKEAVADFDSKSNEEICTSFLGAVNSKNAGLFELTSLGSASDFEFLGVKIPRYRDYTPSSLLKDSILIHQSITGLYETRIDLSKLGED

SEQ ID NO: 654 - protein, 1375 aa, Streptococcus canis
MEKKYSIGLDIGTNSVGWAVITDDYKVPSKKFKVLGNTNRKSIKKNLMGALLFDSGETAEATRLKRTARRRYTRRKNRIRYLQEIFANEMAKLDDSFFQRLEESFLVEEDKKNERHPIFGNLADEVAYHRNYPTIYHLRKKLADSPEKADLRLIYLALAHIIKFRGHFLIEGKLNAENSDVAKLFYQLIQTYNQLFEESPLDEIEVDAKGILSARLSKSKRLEKLIAVFPNEKKNGLFGNIIALALGLTPNFKSNFDLTEDAKLQLSKDTYDDDLDELLGQIGDQYADLFSAAKNLSDAILLSDILRSNSEVTKAPLSASMVKRYDEHHQDLALLKTLVRQQFPEKYAEIFKDDTKNGYAGYVGIGIKHRKRTTKLATQEEFYKFIKPILEKMDGAEELLAKLNRDDLLRKQRTFDNGSIPHQIHLKELHAILRRQEEFYPFLKENREKIEKILTFRIPYYVGPLARGNSRFAWLTRKSEEAITPWNFEEVVDKGASAQSFIERMTNFDEQLPNKKVLPKHSLLYEYFTVYNELTKVKYVTERMRKPEFLSGEQKKAIVDLLFKTNRKVTVKQLKEDYFKKIECFDSVEIIGVEDRFNASLGTYHDLLKIIKDKDFLDNEENEDILEDIVLTLTLFEDREMIEERLKTYAHLFDDKVMKQLKRRHYTGWGRLSRKMINGIRDKQSGKTILDFLKSDGFSNRNFMQLIHDDSLTFKEEIEKAQVSGQGDSLHEQIADLAGSPAIKKGILQTVKIVDELVKVMGHKPENIVIEMARENQTTTKGLQQSRERKKRIEEGIKELESQILKENPVENTQLQNEKLYLYYLQNGRDMYVDQELDINRLSDYDVDHIVPQSFIKDDSIDNKVLTRSVENRGKSDNVPSEEVVKKMKNYWRQLLNAKLITQRKFDNLTKAERGGLSEADKAGFIKRQLVETRQITKHVARILDSRMNTKRDKNDKPIREVKVITLKSKLVSDFRKDFQLYKVRDINNYHHAHDAYLNAVVGTALIKKYPKLESEFVYGDYKVYDVRKMIAKSEQEIGKATAKRFFYSNIMNFFKTEVKLANGEIRKRPLIETNGETGEVVWNKEKDFATVRKVLAMPQVNIVKKTEVQTGGFSKESILSKRESAKLIPRKKGWDTRKYGGFGSPTVAYSILVVAKVEKGKAKKLKSVKVLVGITIMEKGSYEKDPIGFLEAKGYKDIKKELIFKLPKYSLFELENGRRRMLASATELQKANELVLPQHLVRLLYYTQNISATTGSNNLGYIEQHREEFKEIFEKIIDFSEKYILKNKVNSNLKSSFDEQFAVSDSILLSNSFVSLLKYTSFGASGGFTFLDLDVKQGRLRYQTVTEVLDATLIYQSITGLYETRTDLSQLGGD

SEQ ID NO: 655 - protein, 1345 aa, Streptococcus constellatus
MGKPYSIGLDIGTNSVGWAVVTDDYKVPAKKMKVLGNTDKQSIKKNLLGALLFDSGETAEATRLKRTARRRYTRRKNRLRYLQEIFTGEMNKVDENFFQRLDDSFLVDEDKRGEHHPIFGNIAAEVKYHDDFPTIYHLRRHLADTSKKADLRLVYLALAHMIKFRGHFLYEGDLKAENTDVQALFKDFVEEYDKTIEESHLSEITVDALSILTEKVSKSSRLENLIAHYPTEKKNTLFGNLIALSLDLHPNFKTNFQLSEDAKLQFSKDTYEEDLEGFLGEVGDEYADLFASAKNLYDAILLSGILTVDDNSTKAPLSASMVKRYEEHQKDLKKLKDFIKVNAPDQYNAIFKDKNKKGYASYIESGVKQDEFYKYLKGILLKINGSGDFLDKIDREDFLRKQRTFDNGSIPHQIHLQEMHAILRRQGEHYPFLKENQDKIEKILTFRIPYYVGPLARKGSRFAWAEYKADEKITPWNFDDILDKEKSAEKFITRMTLNDLYLPEEKVLPKHSPLYEAFTVYNELTKVKYVNEQGEAKFFDTNMKQEIFDHVFKENRKVTKDKLLNYLNKEFEEFRIVNLTGLDKENKAFNSSLGTYHDLRKILDKSFLDDKANEKTIEDIIQTLTLFEDREMIRQRLQKYSDIFTKAQLKKLERRHYTGWGRLSYKLINGIRNKENKKTILDYLIDDGYANRNFMQLINDDALSFKEEIARAQIIDDVDDIANVVHDLPGSPAIKKGILQSVKIVDELVKVMGHNPANIIIEMARENQTTDKGRRNSQQRLKLLQDSLKNLDNPVNIKNVENQQLQNDRLFLYYIQNGKDMYTGETLDINNLSQYDIDHIIPQAFIKDNSLDNRVLTRSDKNRGKSDDVPSIEVVHEMKSFWSKLLSVKLITQRKFDNLTKAERGGLTEEDKAGFIKRQLVETRQITKHVAQILDERFNTEFDGNKRRIRNVKIITLKSNLVSNFRKEFELYKVREINDYHHAHDAYLNAVVGNALLLKYPQLEPEFVYGEYPKYNSYRSRKSATEKFLFYSNILRFFKKEDIQTNEDGEIAWNKEKHIKILRKVLSYPQVNIVKKTEEQTGGFSKESILPKGESDKLIPRKTKNSYWDPKKYGGFDSPVVAYSILVFADVEKGKSKKLRKVQDMVGITIMEKKRFEKNPVDFLEQRGYRNVRLEKIIKLPKYSLFELENKRRRLLASAKELQKGNELVIPQRFTTLLYHSYRIEKDYEPEHREYVEKHKDEFKELLEYISVFSRKYVLADNNLTKIEMLFSKNKDAEVSSLAKSFISLLTFTAFGAPAAFNFFGENIDRKRYTSVTECLNATLIHQSITGLYETRIDLSKLGED

SEQ ID NO: 656 - protein, 538 aa, Streptococcus dysgalactiae
DYDVDHIVPQSFIKDDSIDNKVLTRSDKNRGKSDNVPSEEVVKKMKNYWRQLLNAKLITQRKFDNLTKAERGGLSELDKAGFIKRQLVETRQITKHVAQILDSRMNTKYDENDKLIREVKVITLKSKLVSDFRKDFQFYKVREINNYHHAHDAYLNAVVGTALIKKYPKLESEFVYGDYKVYDVRKMIAKSEQEIGKATAKRFFYSNIMNFFKTEITLANGEIRKRPLIETNEETGEIVWDKGRDFATVRKVLSMPQVNIVKKTEVQTGALTNESIYARGSFDKLISRKHRFESSKYGGFGSPTVTYSVLVVAKSKVQDGKVKKIKTGKELIGITLLDKLVFEKNPLKFIEDKGYGNVQIDKCIRLPKYSLFEFENGTRRMLASVMANNNSRGDLQKANEMFLPAKLVTLLYHAHKIESSKELEHEAYILDHYNDLYQLLSYIERFASLYVDVEKNISKVKELFSNIESYSISEICSSVINLLTLTASGAPADFKFLGTTIPRKRYGSPQSILSSTLIHQSITGLYETRIDLSQLGGD

SEQ ID NO: 657 - protein, 1155 aa, Streptococcus dysgalactiae
MDKKYSIGLDIGTNSVGWAVITDDYKVPSKKFKVLGNTDRHSIKKNLIGALLFDSGETAEATRLKRSARRRYTRRKNRIRYLQEIFSSEMSKVDDSFFHRLEESFLVEEDKKHERHPIFGNIVDEVAYHEKYPTIYHLRKKLADSTDKADLRLIYLALAHMIKFRGHFLIEGDLNPDNSDMDKLFIQLVQTYNQLFEENPINASRVDAKAILSARLSKSRRLENLIAQLPGEKRNGLFGNLIALSLGLTPNFKSNFDLAEDAKLQLSKDTYDDDLDNLLAQIGDQYADLFLAAKNLSDAILLSDILRVNSEITKAPLSASMIKRYDEHHQDLTLLKALVRQQLPEKYKEIFFDQSKNGYAGYIDGGASQEEFYKFIKPILEKMDGTEELLAKLNREDLLRKQRTFDNGSIPHQIHLGELHAILRRQEDFYPFLKDNREKIEKILTFRIPYYVGPLARGNSRFAWMTRKSEETITPWNFEEVVDKGASAQSFIERMTNFDKNLPNEKVLPKHSLLYEYFTVYNELTKVKYVTEGMRKPEFLSGKQKEAIVDLLFKTNRKVTVKQLKEDYFKKIECFDSVEISGVEDRFNASLGTYHDLLKIIKDKDFLDNEENEDILEDIVLTLTLFEDKEMIEERLKTYAHLFDDKVMKQLKRRHYTGWGRLSRKLINGIRDKQSGKTILDFLKSDGFANRNFIQLIHDDSLTFKEAIQKAQVSGQGHSLHEQIANLAGSPAIKKGILQSVKVVDELVKVMGHKPENIVIEMARENQTTQKGQKNSRERMKRIEEGIKELGSQILKEHPVENTQLQNEKLYLYYLQNRRDMYVDQELDINRLSDYDVDHIVPQSFIKDDSIDNKVLTRSDKNRGKSDDVPSEEVVKKMKNYWRQLLNAKLITQRKFDNLTKAERGGLSELDKAGFIKRQLVETRQITKHVAQILDSRMNTKYDENDKLIREVKVITLKSKLVSDFRKDFQFYKVREINNYHHAHDAYLNAVVGTALIKKYPKLESEFVYGDYKVYDVRKMIAKSEQEIGKATAKRFFYSNIMNFFKTEITLANGEIRKRPLIETNEETGEIVWDKGRDFATVRKVLSMPQVNIVKKTEVQTGALTNESIYARGSFDKLISRKHRFESSKYGGFGSPTVTYSVLVVAKYQSYKMEK

SEQ ID NO: 658 - protein, 1371 aa, Streptococcus dysgalactiae
MDKKYSIGLDIGTNSVGWAVITDDYKVPSKKFKVLGNTDRHSIKKNLIGALLFDSGETAEATRLKRTARRRYTRRKNRIRYLQEIFSSEMSKVDDSFFHRLEESFLVEEDKKHERHPIFGNIVDEVAYHEKYPTIYHLRKKLADSTDKADLRLIYLALAHMIKFRGHFLIEGDLNPDNSDMDKLFIQLVQTYNQLFEENPINASRVDAKAILSARLSKSRRLENLIAQLPGEKRNGLFGNLIALSLGLTPNFKSNFDLAEDAKLQLSKDTYDDDLDNLLAQIGDQYADLFLAAKNLSDAILLSDILRVNSEITKAPLSASMIKRYDEHHQDLTLLKALVRQQLPEKYKEIFFDQSKNGYAGYIDGGASQEEFYKFIKPILEKMDGTEELLAKLNREDLLRKQRTFDNGSIPHQIHLGELHAILRRQEDFYPFLKDNREKIEKILTFRIPYYVGPLARGNSRFAWMTRKSEETITPWNFEEVVDKGASAQSFIERMTNFDKNLPNEKVLPKHSLLYEYFTVYNELTKVKYVTEGMRKPEFLSGKQKEAIVDLLFKTNRKVTVKQLKEDYFKKIECFDSVEISGVEDRFNASLGTYHDLLKIIKDKDFLDNEENEDILEDIVLTLTLFEDKEMIEERLKTYAHLFDDKVMKQLKRRHYTGWGRLSRKLINGIRDKQSGKTILDFLKSDGFANRNFIQLIHDDSLTFKEAIQKAQVSGQGHSLHEQIANLAGSPAIKKGILQSVKVVDELVKVMGHKPENIVIEMARENQTTQKGQKNSRERMKRIEEGIKELGSQILKEHPVENTQLQNEKLYLYYLQNGRDMYVDQELDINRLSDYDVDHIVPQSFIKDDSIDNKVLTRSDKNRGKSDDVPSEEVVKKMKNYWRQLLNAKLITQRKFDNLTKAERGGLSELDKAGFIKRQLVETRQITKHVAQILDSRMNTKYDENDKLIREVKVITLKSKLVSDFRKDFQFYKVREINNYHHAHDAYLNAVVGTALIKKYPKLESEFVYGDYKVYDVRKMIAKSEQEIGKATAKRFFYSNIMNFFKTEITLANGEIRKRPLIETNEETGEIVWNKGRDFATVRKVLSMPQVNIVKKTEVQTGALTNESIYARGSFDKLISRKHRFESSKYGGFGSPTVTYSVLVVAKSKVQDGKVKKIKTGKELIGITLLDKLVFEKNPLKFIEDKGYGNVQIDKCIKLPKYSLFEFENGTRRMLASVMANNNSRGDLQKANEMFLPAKLVTLLYHAHKIESSKELEHEAYILDHYNDLYQLLSYIERFASLYVDVEKNISKVKELFSNIESYSISEICSSVINLLTLTASGAPADFKFLGTTIPRKRYGSPQSILSSTLIHQSITGLYETRIDLSQLGGD

SEQ ID NO: 659 - protein, 1371 aa, Streptococcus dysgalactiae
MDKKYSIGLDIGTNSVGWAVITDDYKVPSKKFKVLGNTDRHSIKKNLIGALLFDSGETAEATRLKRTARRRYTRRKNRIRYLQEIFSSEMSKVDDSFFHRLEESFLVEEDKKHERHPIFGNIVDEVAYHEKYPTIYHLRKKLADSTDKADLRLIYLALAHMIKFRGHFLIEGDLNPDNSDMDKLFIQLVQTYNQLFEENPINASRVDAKAILSARLSKSRRLENLIAQLPGEKRNGLFGNLIALSLGLTPNFKSNFDLAEDAKLQLSKDTYDDDLDNLLAQIGDQYADLFLAAKNLSDAILLSDILRVNSEITKAPLSASMIKRYDEHHQDLTLLKALVRQQLPEKYKEIFFDQSKNGYAGYIDGGASQEEFYKFIKPILEKMDGTEELLAKLNREDLLRKQRTFDNGSIPHQIHLGELHAILRRQEDFYPFLKDNREKIEKILTFRIPYYVGPLARGNSRFAWMTRKSEETITPWNFEEVVDKGASAQSFIERMTNFDKNLPNEKVLPKHSLLYEYFTVYNELTKVKYVTEGMRKPEFLSGKQKEAIVDLLFKTNRKVTVKQLKEDYFKKIECFDSVEISGVEDRFNASLGTYHDLLKIIKDKDFLDNEENEDILEDIVLTLTLFEDKEMIEERLKKYANLFDDKVMKQLKRRHYTGWGRLSRKLINGIRDKQSGKTILDFLKSDGFANRNFMQLINDDSLTFKEAIQKAQVSGQGHSLHEQIANLAGSPAIKKGILQSVKVVDELVKVMGHKPENIVIEMARENQTTQKGQKNSRERMKRIEEGIKELGSQILKEHPVENTQLQNEKLYLYYLQNGRDMYVDQELDINRLSDYDVDHIVPQSFIKDDSIDNKVLTRSDKNRGKSDNVPSEEVVKKMKNYWRQLLNAKLITQRKFDNLTKAERGGLSELDKAGFIKRQLVETRQITKHVAQILDSRMNTKYDENDKLIREVKVITLKSKLVSDFRKDFQFYKVREINNYHHAHDAYLNAVVGTALIKKYPKLESEFVYGDYKVYDVRKMIAKSEQEIGKATAKRFFYSNIMNFFKTEITLANGEIRKRPLIETNEETGEIVWDKGRDFATVRKVLSMPQVNIVKKTEVQTGALTNESIYARGSFDKLISRKHRFESSKYGGFGSPTVTYSVLVVAKSKVQDGKVKKIKTGKELIGITLLDKLVFEKNPLKFIEDKGYGNVQIDKCIKLPKYSLFEFENGTRRMLASVMANNNSRGDLQKANEMFLPAKLVTLLYHAHKIESSKELEHEAYILDHYNDLYQLLSYIERFASLYVDVEKNISKVKELFSNIESYSISEICSSVINLLTLTASGAPADFKFLGTTIPRKRYGSPQSILSSTLIHQSITGLYETRIDLSQLGGD

SEQ ID NO: 660 - protein, 1371 aa, Streptococcus dysgalactiae
MDKKYSIGLDIGTNSVGWAVITDDYKVPSKKFKVLGNTDRHSIKKNLIGALLFDSGETAEATRLKRTARRRYTRRKNRIRYLQEIFSSEMSKVDDSFFHRLEESFLVEEDKKHERHPIFGNIVDEVAYHEKYPTIYHLRKKLADSTDKADLRLIYLALAHMIKFRGHFLIEGDLNPDNSDVDKLFIQLVQTYNQLFEEKPINASGVDAKAILSARLSKSKRLENLIAQLPGEKKNGLFGNLIALSLGLTPNFKSNFDLAEDAKLQLSKDTYDDDLDNLLAQIGNQYADLFLAAKNLSDAILLSDILRVNSEITKAPLSASMIKRYDEHHQDLTLLKALVRQQLPEKYKEIFFDQSKNGYAGYIDGGASQEEFYKFIKPILEKMDGTEELLAKLNREDLLRKQRTFDNGSIPHQIHLGELHAILRRQEDFYPFLKDNREKIEKILTFRIPYYVGPLARGNSRFAWMTRKSEETITPWNFEEVVDKGASAQSFIERMTNFDKNLPNEKVLPKHSLLYEYFTVYNELTKVKYVTEGMRKPEFLSGKQKEAIVDLLFKTNRKVTVKQLKEDYFKKIECFDSVEISGVEDRFNASLGTYHDLLKIIKDKDFLDNEENEDILEDIVLTLTLFEDKEMIEERLKKYANLFDDKVMKQLKRRHYTGWGRLSRKLINGIRDKQSGKTILDFLKSDGFANRNFMQLINDDSLTFKEAIQKAQVSGQGHSLHEQIANLAGSPAIKKGILQSVKVVDELVKVMGHKPENIVIEMARENQTTQKGQKNSRERMKRIEEGIKELGSQILKEHPVENTQLQNEKLYLYYLQNGRDMYVDQELDINRLSDYDVDHIVPQSFIKDDSIDNKVLTRSDKNRGKSDNVPSEEVVKKMKNYWRQLLNAKLITQRKFDNLTKAERGGLSELDKAGFIKRQLVETRQITKHVAQILDSRMNTKYDENDKLIREVKVITLKSKLVSDFRKDFQFYKVREINNYHHAHDAYLNAVVGTALIKKYPKLESEFVYGDYKVYDVRKMIAKSEQEIGKATAKRFFYSNIMNFFKTEITLANGEIRKRPLIETNEETGEIVWDKGRDFATVRKVLSMPQVNIVKKTEVQTGALTNESIYARGSFDKLISRKHRFESSKYGGFGSPTVTYSVLVVAKSKVQDGKVKKIKTGKELIGITLLDKLVFEKNPLKFIEDKGYGNVQIDKCIKLPKYSLFEFENGTRRMLASVMANNNSRGDLQKANEMFLPAKLVTLLYHAHKIESSKELEHEAYILDHYNDLYQLLSYIERFASLYVDVEKNISKVKELFSNIESYSISEICSSVINLLTLTASGAPADFKFLGTTIPRKRYGSPQSILSSTLIHQSITGLYETRIDLSQLGGD

SEQ ID NO: 661 - protein, 1370 aa, Streptococcus gallolyticus; identical to SEQ ID NO: 209

SEQ ID NO: 662 - protein, 1375 aa, Streptococcus infantarius
MEKSYSIGLDIGTNSVGWAVITDDYKVPAKKMKVLGNTDKKYIKKNLLGALLFDSGETAEVTRLKRTARRRYTRRKNRLRYLQEIFAKEMTKVDESFFQRLEESFLTDDDKTFDSHPIFGNKAEEDAYHQKFPTIYHLRKYLADSQEKADLRLVYLALAHMIKYRGHFLIEGELNAENTDVQKLFNVFVETYDKIVDESHLSEIEVDASSILTEKVSKSRRLENLIKQYPTEKKNTLFGNLIALALGLQPNFKTNFKLSEDAKLQFSKDTYEEDLEELLGKVGDDYADLFISAKNLYDAILLSGILTVDDNSTKAPLSASMIKRYVEHHEDLEKLKEFIKINKLKLYHDIFKDKTKNGYAGYIDNGVKQDEFYKYLKTILTKIDDSDYFLDKIERDDFLRKQRTFDNGSIPHQIHLQEMHSILRRQGDYYPFLKENQAKIEKILTFRIPYYVGPLARKDSRFAWANYHSDEPITPWNFDEVVDKEKSAEKFITRMTLNDLYLPEEKVLPKHSHVYETFTVYNELTKIKYVNEQGESFFFDANMKQEIFDHVFKENRKVTKAKLLSYLNNEFEEFRINDLIGLDKDSKSFNASLGTYHDLKKILDKSFLDDKTNGQIIEDIVLTLTLFEDRDMIHERLQKYSDFFTSQQLKKLERRHYTGWGRLSYKLINGIRNKENNKTILDFLIDDGHANRNFMQLINDESLSFKTIIQEAQVVGDVDDIEAVVHDLPGSPAIKKGILQSVKIVDELVKVMGDNPDNIVIEMARENQTTGYGRNKSNQRLKRLQDSLKEFGSDILSKKKPSYVDSKVENSHLQNDRLFLYYIQNGKDMYTGEELDIDRLSDYDIDHIIPQAFIKDNSIDNKVLTSSAKNRGKSDDVPSIEIVRNRRSYWYKLYKSGLISKRKFDNLTKAERGGLTEADKAGFIKRQLVETRQITKHVAQILDARFNTKRDENDKVIRDVKVITLKSNLVSQFRKEFKFYKVREINDYHHAHDAYLNAVVGTALLKKYPKLTPEFVYGEYKKYDVRKLIAKSSDDYSEMGKATAKYFFYSNLMNFFKTEVKYADGRVFERPDIETNADGEVVWNKQKDFDIVRKVLSYPQVNIVKKVEAQTGGFSKESILSKGDSDKLIPRKTKKVYWNTKKYGGFDSPTVAYSVLVVADIEKGKAKKLKTVKELVGISIMERSFFEENPVSFLEKKGYHNVQEDKLIKLPKYSLFEFEGGRRRLLASATELQKGNEVMLPAHLVELLYHAHRIDSFNSTEHLKYVSEHKKEFEKVLSCVENFSNLYVDVEKNLSKVRAAAESMTNFSLEEISASFINLLTLTALGAPADFNFLGEKIPRKRYTSTKECLSATLIHQSVTGLYETRIDLSKLGEE

SEQ ID NO: 663 - protein, 1368 aa, Streptococcus iniae
MRKPYSIGLDIGTNSVGWAVITDDYKVPSKKMRIQGTTDRTSIKKNLIGALLFDNGETAEATRLKRTTRRRYTRRKYRIKELQKIFSSEMNELDIAFFPRLSESFLVSDDKEFENHPIFGNLKDEITYHNDYPTIYHLRQTLADSDQKADLRLIYLALAHIIKFRGHFLIEGNLDSENTDVHVLFLNLVNIYNNLFEEDIVETASIDAEKILTSKTSKSRRLENLIAEIPNQKRNMLFGNLVSLALGLTPNFKTNFELLEDAKLQISKDSYEEDLDNLLAQIGDQYADLFIAAKKLSDAILLSDIITVKGASTKAPLSASMVQRYEEHQQDLALLKNLVKKQIPEKYKEIFDNKEKNGYAGYIDGKTSQEEFYKYIKPILLKLDGTEKLISKLEREDFLRKQRTFDNGSIPHQIHLNELKAIIRRQEKFYPFLKENQKKIEKLFTFKIPYYVGPLANGQSSFAWLKRQSNESITPWNFEEVVDQEASARAFIERMTNFDTYLPEEKVLPKHSPLYEMFMVYNELTKVKYQTEGMKRPVFLSSEDKEEIVNLLFKKERKVTVKQLKEEYFSKMKCFHTVTILGVEDRFNASLGTYHDLLKIFKDKAFLDDEANQDILEEIVWTLTLFEDQAMIERRLVKYADVFEKSVLKKLKKRHYTGWGRLSQKLINGIKDKQTGKTILGFLKDDGVANRNFMQLINDSSLDFAKIIKNEQEKTIKNESLEETIANLAGSPAIKKGILQSIKIVDEIVKIMGQNPDNIVIEMARENQSTMQGIKNSRQRLRKLEEVHKNTGSKILKEYNVSNTQLQSDRLYLYLLQDGKDMYTGKELDYDNLSQYDIDHIIPQSFIKDNSIDNTVLTTQASNRGKSDNVPNIETVNKMKSFWYKQLKSGAISQRKFDHLTKAERGALSDFDKAGFIKRQLVETRQITKHVAQILDSRFNSNLTEDSKSNRNVKIITLKSKMVSDFRKDFGFYKLREVNDYHHAQDAYLNAVVGTALLKKYPKLEAEFVYGDYKHYDLAKLMIQPDSSLGKATTRMFFYSNLMNFFKKEIKLADDTIFTRPQIEVNTETGEIVWDKVKDMQTIRKVMSYPQVNIVMKTEVQTGGFSKESIWPKGDSDKLIARKKSWDPKKYGGFDSPIIAYSVLVVAKIAKGKTQKLKTIKELVGIKIMEQDEFEKDPIAFLEKKGYQDIQTSSIIKLPKYSLFELENGRKRLLASAKELQKGNELALPNKYVKFLYLASHYTKFTGKEEDREKKRSYVESHLYYFDEIMQIIVEYSNRYILADSNLIKIQNLYKEKDNFSIEEQAINMLNLFTFTDLGAPSAFKFFNGDIDRKRYSSTNEIINSTLIYQSPTGLYETRIDLSKLGGK

SEQ ID NO: 664 - protein, 1392 aa, Streptococcus mitis
MNNNNYSIGLDIGTNSVGWAVITDDYKVPSKKMKVLGNTDKHFIKKNLIGALLFDEGATAEDRRFKRTARRRYTRRKNRLRYLQEIFSEEMSKVDSSFFHRLDDSFLVPEDKRGSKYPIFATLAEEKEYHKKFPTIYHLRKHLADSKEKTDLRLIYLALAHMIKYRGHFLYEESFDIKNNDIQKIFSEFISIYDNTFEGSSLSGQNAQVEAIFTDKISKSAKRERILKLFAYEKSTDLFSEFLKLIVGNQADFKKHFDLEEKAPLQFSKDTYDEDLENLLGQIGDDFADLFLVAKKLYDAILLSGILTVTDSSTKAPLSASMIERYENHQKDLAALKQFIQNNLQEKYDEVFSDQSKDGYARYINGKTTQEAFYKYIKNLLSKFEGSDYFLDKIEREDFLRKQRTFDNGSIPHQIHLQEMNAIIRRQGEHYPFLKEYKEKIETILTFRIPYYVGPLARGNRNFAWLTRNSDQAIRPWNFEEIVDQASSAEEFINKMTNYDLYLPEEKVLPKHSLLYETFAVYNELTKVKFISEGLRDYQFLDSGQKKQIVNQLFKEKRKVTEKDIIQYLHNVDGYDGIELKGIEKQFNASLSTYHDLLKIIKDKEFMDDPKNEEILENIVHTLTIFEDREMIKQRLAQYASIFDKKVIKALTRRHYTGWGKLSAKLINGICDKKTGKTILDYLIDDGYSNRNFMQLINDDGLSFKDIIQKAQVVGKTNDVKQVVQELPGSPAIKKGILQSIKLVDELVKVMGHAPESIVIEIARENQTTARGKKNSQQRYKRIEDALKNLAPGLDSNILKEHPTDNIQLQNDRLFLYYLQNGKDMYTGEALDINQLSSYDIDHIVPQAFIKDDSLDNRVLTSSKDNRGKSDNVPSLEVVQKRKAFWQQLLDSKLISEHKFNNLTKAERGGLDERDKVGFIRRQLVETRQITKHVAQILDARFNTEVNEKDKKNRTVKIITLKSNLVSNFRKEFKLYKVREINDYHHAHDAYLNAVVAKAILKKYPKLEPGFVYGDYQKYDIKRYISRSKDPKEVEKATEKYFFYSNLLNFFKEEVHYADGTIVKRENIEYSKDTGEIAWNKEKDFATIKKVLSLPQVNIVKKTEIQTHGLDRGKPRGLFNSNPSPKPSEDRKENLVPIKQGLDPRKYGGYAGISNSYAVLVKAIIEKGAKKQQKTVLEFQGISILDKINFEKNKENYLLEKGYIKILSTITLPKYSLFEFPDGTRRRLASILSTNNKRGEIHKGNELVIPEKYTTLLYHAKNINKTLEPEHLEYVEKHRNDFAKLLEYVLNFNDKYVGALKNGERIRQAFIDWETVDIEKLCFSFIGPRNSKNAGLFELTSQGSASDFEFLGVKIPRYRDYTPSSLLNATLIHQSITGLYETRIDLSKLGED

SEQ ID NO: 665 - protein, 1134 aa, Streptococcus mutans
MANGKILGLDIGIASVGVGIIDKETGKIIHVNSRIFPAATADSNVERRGFRQGRRLVRRKKHRKVRLADLFLDSNLLTDFSKVSLNLNPYQLRVKGLNEELSNEELFIALKSIVSRRGISYLDDASEDSGANSSEYGKAVEENRKLLEDRTPGQIQLERFEKYGKVRGDFTVVENGENHRLINVFSTSAYKKEAERILRRQQEFNMRIADEFIEAYLTILTGKRKYYHGPGNEKSRTDYGRFRTDGTTLDNIFGILIGKCTFYPDEYRAAKASYTAQEFNLLNDLNNLTVPTETKKLSEEQKRQIIEHAKTVKTLGAPTLLKYIVKLVGCSADDIKGYRIDKSDKPEIHTFEAYRKMRTMELIKVDDLSRESLDALAHILTLNTEREGIEEAIRDRFTNKEFNQEQINELVLFRKNNSSLFGKGWHNFSLKLMKELIPELYETSEEQMTILTRLGKQRVKKSSNRTNYIDEKELTEEIYNPVVAKSVRQAIKIINLATKKYGVFDNIVIEMARESNEDDEKKAIQNAQKANEDEKKAALLKAAHQFNGKEELPDSIFHGHKELLTKIRLWHQQGEKCLYTGKTIFINDLIHNPYKYEIDHILPLSLSFDDSLANKVLVLSTANQEKGQRTPFQSLDSMDGAWTYREFKSYVKGLKTLSNKKKDYLLTEENIDKIEVKQKFIERNLVDTRYSSRVVLNALQDFYKERKFDTKISVVRGQFTSQLRRKWRIEKTRETYHHHAVDALIIAASSQLNLWKKQNNPLISYKEDQFVDPETGEILSLSDDEYKKLVFKAPYEHFVDTLKSKKFEDSILFSYQVDSKYNRKISGATICGTRKAQLGKDTQEETYVLGKIKDIYSQKGYEDFIKKYKKDKTQFLMYHKDPQTFEKVIEEILKTYPDKELNEKGKEVSCNPFEKYRQENGPVRKYSKKGNGPEIKSLKYYDEVLGKNIDITPKNSLNKVVLRSLNPWRTDVYFNHETRKYEFLGLKYSDLRYLKGEHRYGILIGDYKKIKDKEGIEKESEFKFTLYKNDLILIKDTAKGKEELFRFWSRTGKDNAKTFEKNKIELKPYSKSQFEKGEDTNVLGKLYASSNQLQKSFGTLENLSIYKVRTDVLGNKYFIKKEGDKPQLNFKKKL

SEQ ID NO: 666 - protein, 1134 aa, Streptococcus mutans; identical to SEQ ID NO: 665

SEQ ID NO: 667 - protein, 1128 aa, Streptococcus mutans
MANSKILGLDIGIASVGVGIIDKETGKIIHVNSRIFPAATADSNVERRGFRQGRRLVRRKKHRKVRLADLFLDSNLLTDFSKVSLNLNPYQLRVKGLNEELSNEELFIALKSIVSRRGISYLDDASEDSGANSSEYGKAVEENRKLLEDRTPGQIQLERFEKYGKVRGDFTVVENGENHRLINVFSTSAYKKEAERILRRQQEFNIRIADEFIEAYLTILTGKRKYYHGPGNEKSRTDYGRFRTDGTTLDNIFGILIGKCTFYPDEYRAAKASYTAQEFNLLNDLNNLTVPTETKKLSEEQKRQIIEHAKTVKTLGAPTLLKYIAKLVGCSADDIKGYRIDKSDKPEIHTFEAYRKMRTMELIKVADLSRESLDALAHILTLNTEREGIEEAIRDRFTNKEFNQEQINELVLFRKNNSSLFGKGWHNFSLKLMKELIPELYETSEEQMTILTRLGKQRVKKSSNRTNYIDEKELTEEIYNPVVAKSVRQAIKIINLATKKYGVFDNIVIEMARESNEDDEKKAIQNAQKANEDEKEAALLKAAHQFNGKEELPDSIFHGHKELLTKIRLWHQQGEKCLYTGKTIFINDLIHNPYKYEIDHILPLSLSFDDSLANKVLVLSTANQEKGQRTPFQSLDSMDGAWTYREFKAYVKGLKTLSNKKKDYLLNEEDINKNEVKQKFIERNLVDTRYSSRVVLNTLQDFYKKREFDTKISVVRGQFTSQIRRKWRIEKTRETYHHHAVDALIIAASSQLNLWKKQNNPLISYKEDQFVDPETGEILSLSDDEYKELVFKAPYDHFVDTLKSKKFEDSILFSYQVDSKYNRKISDATIYGTRKARLGKDSQEETYVLGKIKDIYSQKGYEDFIKKYKKDKTQFLMYHKDPQTFEKVIEEILKTYSDKELNEKGKEVPCNPFEKYRQENGPVRKYSKKGNGPEIKSIKYYDNKLGNHIDITPNNSHHQVVLQSLKPWRTDVYFNPKSGKYELMGLKYSDLRFEKVSGDYGISVKKYNEIKSKEGVDENSEFKFTLYKNDLILIKDTESGEQELFRFLSRTMPNQKHYVELKPYDKSKFEGHQKLMDIFGEVAKGGQCLKGLNKSNISIYKVKTDVLGNKYFIKKEGDQPQLNFKKKI

SEQ ID NO: 668 - protein, 1128 aa, Streptococcus mutans; identical to SEQ ID NO: 667

SEQ ID NO: 669 - protein, 1338 aa, Streptococcus mutans
MDLIGTNSVGWAVVTDDYKVPAKKMKVLGNTDKSHIKKNLLGALLFDSGNTAADRRLKRTARRRYTRRRNRILYLQEIFAEEMSKVDDSFFHRLEDSFLVTEDKRGERHPIFGNLEEEVKYHENFPTIYHLRQYLADNPEKVDLRLVYLALAHIIKFRGHFLIEGKFDTRNNDVQRLFQEFLAVYDNTFENSSLQEQNVQVEEILTDKISKSAKKDRVLKLFPNEKSNGRFAEFLKLIVGNQADFKKHFELEEKAPLQFSKDTYEEELEVLLAQIGDNYAELFLSAKKLYDSILLSGILTVTDVSTKAPLSASMIQRYNEHQMDLAQLKQFIRQKLSDKYNEVFSDVSKDGYAGYIDGKTNQEAFYKYLKGLLNKIEGSGYFLDKIEREDFLRKQRTFDNGSIPHQIHLQEMRAIIRRQAEFYPFLADNQDRIEKILTFRIPYYVGPLARGKSDFAWLSRKSADKITPWNFDEIVDKESSAEAFINRMTNYDLYLPNQKVLPKHSLLYEKFTVYNELTKVKYKTEQGKTAFFDANMKQEIFDGVFKVYRKVTKDKLMDFLEKEFDEFRIVDLTGLDKENKAFNASYGTYHDLRKILDKDFLDNSKNEKILEDIVLTLTLFEDREMIRKRLENYSDLLTKEQVKKLERRHYTGWGRLSAELIHGIRNKESRKTILDYLIDDGNSNRNFMQLINDDALSFKEEIAKAQVIGETDNLNQVVSDIAGSPAIKKGILQSLKIVDELVKIMGHQPENIVVEMARENQFTNQGRRNSQQRLKGLTDSIKEFGSQILKEHPVEHSQLQNDRLFLYYLQNGRDMYTGEELDIDYLSQYDIDHIIPQAFIKDNSIDNRVLTSSKENRGKSDDVPSKNVVRKMKSYWSKLLSAKLITQRKFDNLTKAERGGLTDDDKAGFIKRQLVETRQITKHVARILDERFHTETDENNKKIRQVKIVTLKSNLVSNFRKEFELYKVREINDYHHAHDAYLNAVIGKALLGVYPQLEPEFVYGDYPHFHGHKENKATAKKFFYSNIMNFFKKDDVRTDKNGEIIWKKDEHISNIKKVLSYPQVNIVKKVEEQTGGFSKESILPKGNSDKLIPRKTKKFYWDTKKYGGFDSPIVAYSILVIADIEKGKSKKLKTVKALVGVTIMEKMTFERDPVAFLERKGYRNVQEENIIKLPKYSLFKLENGRKRLLASARELQKGNEIVLPNHLGTLLYHAKNIHKVDEPKHLDYVDKHKDEFKELLDVVSNFSKKYTLAEGNLEKIKELYAQNNGEDLKELASSFINLLTFTAIGAPATFKFFDKNIDRKRYTSTTEILNATLIHQSITGLYETRIDLSKLGGD

SEQ ID NO: 670 - protein, 1338 aa, Streptococcus mutans; identical to SEQ ID NO: 669

SEQ ID NO: 671 - protein, 1345 aa, Streptococcus mutans
MKKPYSIGLDIGTNSVGWAVVTDDYKVPAKKMKVLGNTDKSHIEKNLLGALLFDSGNTAEDRRLKRTARRRYTRRRNRILYLQEIFSEEMGKVDDSFFHRLEDFFLVTEDKRGERHPIFGNLEEEVKYHENFPTIYHLRQYLADNPEKVDLRLVYLALAHIIKFRGHFLIEGKFDTRNNDVQRLFQEFLAVYDNTFENSSLQEQNVQVEEILTDKISKSAKKDRVLKLFPNEKSNGRFAEFLKLIVGNQADFKKHFELEEKAPLQFSKDTYEEELEVLLAQIGDNYAELFLSAKKLYDSILLSGILTADDSSTKAPLSASMIQRYNEHQMDLAQLKQFIRQKLSDKYNEVFSDVSKDGYAGYIDGKTNQEAFYKYLKGLLNKIEGSGYFLDKIEREDFLRKQRTFDNGSIPHQIHLQEMRAIIRRQSEFYPFLADNQDRIEKILTFRIPYYVGPLARGKSDFAWLSRKSADKITPWNFDEIVDKESSAEAFINRMTNYDLYLPNQKVLPKHSLLYEKFTVYNELTKVKYKTEQGETAFFDANMKQEIFDGVFKVYRKVTKDKLMDFLEKEFDEFRIVDLTGLDKENKAFNASYGTYHDLRKILDKDFLDNSKNEKILEDIVLTLTLFEDREMIRKRLKNYSDLLTKEQLKKLERRHYTGWGRLSAELIHGIRNKESRKTILDYLIDDGNSNRNFMQLINDDALSFKEEIAKAQVIGETDNLNQVVSDIAGSPAIKKGILQSLKIVDELVKIMGHQPENIVVEMARENQFTNQGRRNSQQRLKGLTDSIKEFGSQILKEHPVENSQLQNDRLFLYYLQNGRDMYTGEELDIDYLSQYDIDHIIPQAFIKDNSIDNRVLTSSKENRGKSDDVPSKDVVRKMKPYWSKLLSAKLITQRKFDNLTKAERGGLTDDDKAGFIKRQLVETRQITKHVARILDERFNTETDENNKKIRQVKIVTLKSNLVSNFRKEFELYKVREINDYHHAHDAYLNAVIGKALLGVYPQLEPEFVYGDYPHFHGHEENKATAKKFFYSNIMNFFKKDDVRTDKNGEIIWKKDEHISNIKKVLSYPQVNIVKKVEEQTGGFSKESILPKGNSDKLIPRKTKKFYWDTKKYGGFDSPIVAYSILVIADIEKGKSKKLKTVKALVGVTIMEKMTFERDPVAFLERKGYRNVQEENIIKLPKYSLFKLENGRKRLLASARELQKGNEIVLPNHLGTLLYHAKNIHKVDEPKHLDYVDKHKDEFKELLDVVSNFSKKYTLAEGNLEKIKELYAQNNGEDLKELASSFINLLTFTAIGAPATFKFFDKNIDRKRYTSTTEILNATLIHQSITGLYETRIDLSKLGGD

SEQ ID NO: 672 - protein, 1345 aa, Streptococcus mutans; identical to SEQ ID NO: 671

SEQ ID NO: 673 - protein, 1229 aa, Streptococcus mutans
MKKPYSIGLDIGTNSVGWAVVTDDYKVPAKKMKVLGNTDKSHIEKNLLGALLFDSGNTAEDRRLKRTARRRYTRRRNRILYLQEIFSEEMGKVDDSFFHRLEDSFLVTEDKRGERHPIFGNLEEEVKYHENFPTIYHLRQYLADNPEKVDLRLVYLALAHIIKFRGHFLIEGKFDTRNNDVQRLFQEFLAVYDNTFENSSLQEQNIQVEEILTDKISKSAKKDRVLKLFPNEKSNGRFAEFLKLIVGNQADFKKHFELEEKAPLQFSKDTYEEELEVLLAQIGDNYAELFLSAKKLYDSILLSGILTVTDVGTKAPLSASMIQRYNEHQMDLTQLKQFIRQKLSDKYNEVFSDVSKDGYAGYIDGKTNQEAFYKYLKGLLNKIEGSGYFLDKIEREDFLRKQRTFDNGSIPHQIHLQEMRAIIRRQAEFYPFLADNQDRIEKILTFRIPYYVGPLARGKSDFAWLSRKSADKITPWNFDEIVDKESSAEAFINRMTNYDLYLPNQKVLPKHSLLYEKFTVYNELTKVKYKTEQGKTAFFDANMKQEIFDGVFKVYRKVTKDKLMDFLEKEFDEFRIVDLTGLDKENKVFNASYGTYHDLCKILDKDFLDNSKNEKILEDIVLTLTLFEDREMIRKRLENYSDLLTKEQVKKLERRHYTGWGRLSAELIHGIRNKESRKTILDYLIDDGNSNRNFMQLINDDALSFKEEIAKAQVIGETDNLNQVVSDIAGSPAIKKGILQSLKIVDELVKIMGHQPENIVVEMARENQFTNQGRRNSQQRLKGLTDSIKEFGSQILKEHPVENSQLQNDRLFLYYLQNGRDMYTGEELDIDYLSQYDIDHIIPQAFIKDNSIDNRVLTSSKENRGKSDDVPSKDVVRKMKPYWSKLLSAKLITQRKFDNLTKAERGGLTDDDKAGFIKRQLVETRQITKHVARILDERFNTETDENNKKIRQVKIVTLKSNLVSNFRKEFELYKVREINDYHHAHDAYLNAVIGKALLGVYPQLEPEFVYGDYPHFHGHEENKATAKKFFYSNIMNFFKKDDVRTDKNGEIIWKKDEHISNIKKVLSYPQVNIVKKVEEQTIGQNGGLFDDNPKSPLEVIPSKLVPLKKALNPEKYGGYQKPTTAYPILLIVDTKQLIPISVMDKKRFEQNPVKFLKDKGYQQIEKNNFVKLPKYTLVDIGNGIKRLWASSKEVHKGNQLVVSKKSQDLLYHAHHLDNDYSNEYVKNHY

SEQ ID NO: 674 - protein, 1229 aa, Streptococcus mutans; identical to SEQ ID NO: 673

SEQ ID NO: 675 - protein, 1345 aa, Streptococcus mutans
MKKPYSIGLDIGTNSVGWAVVTDDYKVPAKKMKVLGNTDKSHIEKNLLGALLFDSGNTAEDRRLKRTARRRYTRRRNRILYLQEIFSEEMGKVDDSFFHRLEDSFLVTEDKRGERHPIFGNLEEEVKYHENFPTIYHLRQYLADNPEKVDLRLVYLALAHIIKFRGHFLIEGKFDTRNNDVQRLFQEFLAVYDNTFENSSLQEQNVQVEEILTDKISKSAKKDRVLKLFPNEKSNGRFAEFLKLIVGNQADFKKHFELEEKAPLQFSKDTYEEELEVLLAQIGDNYAELFLSAKKLYDSILLSGILTVTDVGTKAPLSASMIQRYNEHQMDLAQLKQFIRQKLSDKYNEVFSDVSKDGYAGYIDGKTNQEAFYKYLKGLLNKIEGSGYFLDKIEREDFLRKQRTFDNGSIPHQIHLQEMRAIIRRQAEFYPFLADNQDRIEKLLTFRIPYYVGPLARGKSDFAWLSRKSADKITPWNFDEIVDKESSAEAFINRMTNYDLYLPNQKVLPKHSLLYEKFTVYNELIKVKYKTEQGKTAFFDANMKQEIFDGVFKVYRKVTKDKLMDFLEKEFDEFRIVDLTGLDKENKVFNASYGTYHDLCKILDKDFLDNSKNEKILEDIVLTLTLFEDREMIRKRLENYSDLLTKEQVKKLERRHYTGWGRLSAELIHGIRNKESRKTILDYLIDDGNSNRNFMQLINDDALSFKEEIAKAQVIGETDNLNQVVSDIAGSPAIKKGILQSLKIVDELVKIMGHQPENIVVEMARENQFTNQGRRNSQQRLKGLTDSIKEFGSQILKEHPVENSQLQNDRLFLYYLQNGRDMYTGEELDIDYLSQYDIDHIIPQAFIKDNSIDNRVLTSSKENRGKSDDVPSKDVVRKMKSYWSKLLSAKLITQRKFDNLTKAERGGLTDDDKAGFIKRQLVETRQITKHVARILDERFNTETDENNKKIRQVKIVTLKSNLVSNFRKEFELYKVREINDYHHAHDAYLNAVIGKALLGVYPQLEPEFVYGDYPHFHGHKENKATAKKFFYSNIMNFFKKDDVRTDKNGEIIWKKDEHISNIKKVLSYPQVNIVKKVEEQTGGFSKESILPKGNSDKLIPRKTKKFYWDTKKYGGFDSPIVAYSILVIADIEKGKSKKLKTVKALVGVTIMEKMTFERDPVAFLERKGYRNVQEENIIKLPKYSLFKLENGRKRLLASARELQKGNEIVLPNHLGTLLYHAKNIHKVDEPKHLDYVDKHKDEFKELLDVVSNFSKKYTLAEGNLEKIKELYAQNNGEDLKELASSFINLLTFTAIGAPATFKFFDKNIDRKRYTSTTEILNATLIHQSITGLYETRIDLNKLGGD

SEQ ID NO: 676 - protein, 1350 aa, Streptococcus mutans
MKKPYSIGLDIGTNSVGWAVVTDDYKVPAKKMKVLGNTDKSHIEKNLLGALLFDSGNTAEDRRLKRTARRRYTRRRNRILYLQEIFSEEMGKVDDSFFHRLEDSFLVTEDKRGERHPIFGNLEEEVKYHENFPTIYHLRQYLADNPEKVDLRLVYLALAHIIKFRGHFLIEGKFDTRNNDVQRLFQEFLAVYDNTFENSSLQEQNVQVEEILTDKISKSAKKDRVLKLFPNEKSNGRFAEFLKLIVGNQADFKKHFELEEKAPLQFSKDTYEEELEVLLAQIGDNYAELFLSAKKLYDSILLSGILTVTDVSTKAPLSASMIQRYNEHQMDLTQLKQFIRQKLSDKYNEVFSDVSKDGYAGYIDGKTNQEAFYKYLKGLLNKIEGSGYFLDKIEREDFLRKQRTFDNGSIPHQIHLQEMRAIIRRQAEFYSFLADNQDRIEKILTFRIPYYVGPLARGKSDFAWLSRKSADKITPWNFDEIVDKESSAEAFINRMTNYDLYLPNQKVLPKHSLLYEKFTVYNELTKVKYKTEQGKTAFFDANMKQEIFDGVFKVYRKVTKDKLMDFLEKEFDEFRIVDLTGLDKENKAFNASYGTYHDLRKILDKDFLDNSKNEKILEDIVLTLTLFEDREMIRKRLENYSDLLTKEQVKKLERRHYTGWGRLSAELIHGIRNKESRKTILDYLIDDGNSNRNFMQLINDDALSFKEEIAKAQVIGETDNLNQVVSDIAGSPAIKKGILQSLKIVDELVKIMGHQPENIVVEMARENQFTNQGRRNSQQRLKGLTDSIKEFGSQILKEHPVENSQLQNDRLFLYYLQNGRDMYTGEELDIDYLSQYDIDHIIPQAFIKDNSIDNRVLTSSKENRGKSDDVPSEDVVNRMRPFWNKLLSSGLISQRKYNNLTKKELTLDDKAGFIKRQLVETRQITKHVARMLDERFNKEFDDNNKRIRKVKIVTLKSNLVSSFRKEFELYKVREINDYHHAHDAYLNAVVVKALLVKYSKLEPEFVYGEYPKYNSYRERKTATQKMFFYSNIMNMFKSKVKLADDQIVERPMIEVNDETGEIAWDKTKHITTVKKVLSYPQVNIVKKVEEQTIGQNGGLFDDNPKSPLEVIPSKLVPLKKALNPEKYGGYQKPTTAYPILLIVDTKQLIPISVMDKKRFEQNPVKFLKDKGYQQIEKNNFVKLPKYTLVDIGNGIKRLWASSKEVHKGNQLVVSKKSQDLLYHAHHLDNDYSNEYVKNHYQQFDILFNEITSFSKKCKLGKEHIQKIEEAYSKERDSASIEELADGFIKLLGFTQLGATSPFSFLGIKLNQKQYTGKKDYLLPCMEATLIHQSITGLYETRIDLSKLGGD

SEQ ID NO: 677 - protein, 1350 aa, Streptococcus mutans
MKKPYSIGLDIGTNSVGWAVVTDDYKVPAKKMKVLGNTDKSHIEKNLLGALLFDSGNTAEDRRLKRTARRRYTRRRNRILYLQEIFSEEMGKVDDSFFHRLEDSFLVTEDKRGERHPIFGNLEEEVKYHENFPTIYHLRQYLADNPEKVDLRLVYLALAHIIKFRGHFLIEGKFDTRNNDVQRLFQEFLAVYDNTFENSSLQEQNVQVEEILTDKISKSAKKDRVLKLFPNEKSNGRFAEFLKLIVGNQADFKKHFELEEKAPLQFSKDTYEEELEVLLAQIGDNYAELFLSAKKLYDSILLSGILTVTDVSTKAPLSASMIQRYNEHQMDLTQLKQFIRQKLSDKYNEVFSDVSKDGYAGYIDGKTNQEAFYKYLKGLLNKIEGSGYFLDKIEREDFLRKQRTFDNGSIPHQIHLQEMRAIIRRQAEFYPFLADNQDRIEKILTFRIPYYVGPLARGKSDFAWLSRKSADKITPWNFDEIVDKESSAEAFINRMTNYDLYLPNQKVLPKHSLLYEKFTVYNELTKVKYKTEQGKTAFFDANMKQEIFDGVFKVYRKVTKDKLMDFLEKEFDEFRIVDLTGLDKENKAFNASYGTYHDLRKILDKDFLDNSKNEKILEDIVLTLTLFEDREMIRKRLKNYSDLLTKEQLKKLERRHYTGWGRLSAELIHGIRNKESRKTILDYLIDDGNSNRNFMQLINDDALSFKEEIAKAQVIGETDNLNQVVSDIAGSPAIKKGILQSLKIVDELVKIMGHQPENIVVEMARENQFTNQGRQNSQQRLKGLTDSIKEFGSQILKEHPVENSQLQNDRLFLYYLQNGRDMYTGEELDIDYLSQYDIDHIIPQAFIKDNSIDNRVLTSSKENRGKSDDVPSEDVVNRMRPFWNKLLSSGLISQRKYNNLTKKELTLDDKAGFIKRQLVETRQITKHVARMLDERFNKEFDDNNKRICKVKIVTLKSNLVSSFRKEFELYKVREINDYHHAHDAYLNAVVVKALLVKYSKLEPEFVYGEYPKYNSYRERKTATQKMFFYSNIMNMFKSKVKLADDQIVERPMIEVNDETGEIAWDKTKHITTVKKVLSYPQVNIVKKVEEQTIGQNGGLFDDNPKSPLEVIPSKLVPLKKALNPEKYGGYQKPTTAYPILLIVDTKQLIPISVMDKKRFEQNPVKFLKDKGYQQIEKNNFVKLPKYTLVDIGNGIKRLWASSKEVHKGNQLVVSKKSQDLLYHAHHLDNDYSNEYVKNHYQQFDILFNEITSFSKKCKLGKEHIQKIEEAYSKERDSASIEELADGFIKLLGFTQLGATSPFSFLGIKLNQKQYTGKKDYLLPCMEATLIHQSITGLYETRIDLSKLGGD

SEQ ID NO: 678 - protein, 1345 aa, Streptococcus mutans; identical to SEQ ID NO: 675

SEQ ID NO: 679 - protein, 1350 aa, Streptococcus mutans; identical to SEQ ID NO: 676

SEQ ID NO: 680 - protein, 1350 aa, Streptococcus mutans; identical to SEQ ID NO: 677

SEQ ID NO: 681 - protein, 1345 aa, Streptococcus mutans
MKKPYSIGLDIGTNSVGWAVVTDDYKVPAKKMKVLGNTDKSHIKKNLLGALLFDSGNTAADRRLKRTARRRYTRRRNRILYLQEIFAEEMSKVDDSFFHRLEDSFLVTEDKRGERHPIFGNLEEEVKYHENFPTIYHLRQYLADNPEKVDLRLVYLALAHIIKFRGHFLIEGKFDTRNNDVQRLFQEFLAVYDNTFENSSLQEQNVQVEEILTDKISKSAKKDRVLKLFPNEKSNGRFAEFLKLIVGNQADFKKHFELEEKAPLQFSKDTYEEELEVLLTQIGDNYAELFLSAKKLYDSILLSGILTVTDVSTKAPLSASMIQRYNEHQMDLAQLKQFIRQKLSDKYNEVFSDVSKDGYAGYIDGKTNQEAFYKYLKGLLNKIEGSGYFLDKIEREDFLRKQRTFDNGSIPHQIHLQEMRAIIRRQAEFYPFLADNQDRIEKILTFRIPYYVGPLARGKSDFAWLSRKSADKITPWNFDEIVDKESSAEAFINRMTNYDLYLPNQKVLPKHSLLYEKFTVYNELTKVKYKTEQGKTAFFDANMKQEIFDGVFKVYRKVTKDKLMDFLEKEFDEFRIVDLTGLDKENKAFNASYGTYHDLRKILDKDFLDNSKNEKILEDIVLTLTLFEDREMIRKRLENYSDLLTKEQVKKLERRHYTGWGRLSAELIHGIRNKESRKTLLDYLIDDGNSNRNFMQLINDDALSFKEEIAKAQVIGETDNLNQVVSDIAGSPAIKKGILQSLKIVDELVKIMGHQPENIVVEMARENQFTNQGRRNSQQRLKGLTDSIKEFGSQILKEHPVENSQLQNDRLFLYYLQNGRDMYTGEELDIDYLSQYDIDHIIPQAFIKDNSIDNRVLTSSKENRGKSDDVPSKDVVRKMKPYWSKLLSAKLITQRKFDNLTKAERGGLTDDDKAGFIKRQLVETRQITKHVARILDERFNTETDENNKKIRQVKIVTLKSNLVSNFRKEFELYKVREINDYHHAHDAYLNAVIGKALLGVYPQLEPEFVYGDYPHFHGHEENKATAKKFFYSNIMNFFKKDDVRTDKNGEIIWKKDEHISNIKKVLSYPQVNIVKKVEEQTGGFSKESILPKGNSDKLIPRKTKKFYWDTKKYGGFDSPIVAYSILVIADIEKGKSKKLKTVKALVGVTIMEKMTFERDPVAFLERKGYRNVQEENIIKLPKYSLFKLENGRKRLLASARELQKGNEIVLPNHLGTLLYHAKNIHKVDEPKHLDYVDKHKDEFKELLDVVSNFSKKYTLAEGNLEKIKELYAQNNGEDLKELSSSFINLLTFTAIGAPAAFKFFDKNIDRKRYTSTTEILNATLIHQSITGLYETRIDLSKLGGD

SEQ ID NO: 682 - protein, 1345 aa, Streptococcus mutans
MKKPYSIGLDIGTNSVGWAVVTDDYKVPAKKMKVLGNTDKSHIKKNLLGALLFDSGNTAADRRLKRTARRRYTRRRNRILYLQEIFAEEMSKVDDSFFHRLEDSFLVTEDKRGERHPIFGNLEEEVKYHENFPTIYHLRQYLADNPEKVDLRLVYLALAHIIKFRGHFLIEGKFDTRNNDVQRLFQEFLAVYDNTFENSSLQEQNVQVEEILTDKISKSAKKDRVLKLFPNEKSNGRFAEFLKLIVGNQADFKKHFELEEKAPLQFSKDTYEEELEVLLAQIGDNYAELFLSAKKLYDSILLSGILTVTDVSTKAPLSASMIQRYNEHQMDLAQLKQFIRQKLSDKYNEVFSDVSKDGYAGYIDGKTNQEAFYKYLKGLLNKIEGSGYFLDKIEREDFLRKQRTFDNGSIPHQIHLQEMRAIIRRQAEFYPFLADNQDRIEKILTFRIPYYVGPLARGKSDFAWLSRKSADKITPWNFDEIVDKESSAEAFINRMTNYDLYLPNQKVLPKHSLLYEKFTVYNELTKVKYKTEQGKTAFFDANMKQEIFDGVFKVYRKVTKDKLMDFLEKEFDEFRIVDLTGLDKENKAFNASYGTYHDLRKILDKDFLDNSKNEKILEDIVLTLTLFEDREMIRKRLENYSDLLTKEQVKKLERRHYTGWGRLSAELIHGIRNKESRKTILDYLIDDGNSNRNFMQLINDDALSFKEEIAKAQVIGETDNLNQVVSDIAGSPAIKKGILQSLKIVDELVKIMGHQPENIVVEMARENQFTNQGRRNSQQRLKGLTDSIKEFGSQILKEHPVEHSQLQNDRLFLYYLQNGRDMYTGEELDIDYLSQYDIDHIIPQAFIKDNSIDNRVLTSSKENRGKSDDVPSKNVVRKMKSYWSKLLSAKLITQRKFDNLTKAERGGLTDDDKAGFIKRQLVETRQITKHVARILDERFHTETDENNKKIRQVKIVTLKSNLVSNFRKEFELYKVREINDYHHAHDAYLNAVIGKALLGVYPQLEPEFVYGDYPHFHGHKENKATAKKFFYSNIMNFFKKDDVRTDKNGEIIWKKDEHISNIKKVLSYPQVNIVKKVEEQTGGFSKESILPKGNSDKLIPRKTKKFYWDTKKYGGFDSPIVAYSILVIADIEKGKSKKLKTVKALVGVTIMEKMTFERDPVAFLERKGYRNVQEENIIKLPKYSLFKLENGRKRLLASARELQKGNEIVLPNHLGTLLYHAKNIHKVDEPKHLDYVDKHKDEFKELLDVVSNFSKKYTLAEGNLEKIKELYAQNNGEDLKELASSFINLLTFTAIGAPATFKFFDKNIDRKRYTSTTEILNATLIHQSITGLYETRIDLSKLGGD

SEQ ID NO: 683 - protein, 1345 aa, Streptococcus mutans
MKKPYSIGLDIGTNSVGWAVVTDDYKVPAKKMKVLGNTDKSHIKKNLLGALLFDSGNTAADRRLKRTARRRYTRRRNRILYLQEIFAEEMSKVDDSFFHRLEDSFLVTEDKRGERHPIFGNLEEEVKYHENFPTIYHLRQYLADNPEKVDLRLVYLALAHIIKFRGHFLIEGKFDTRNNDVQRLFQEFLAVYDNTFENSSLQEQNVQVEEILTDKISKSAKKDRVLKLFPNEKSNGRFAEFLKLIVGNQADFKKHFELEEKAPLQFSKDTYEEELEVLLAQIGDNYAELFLSAKKLYDSILLSGILTVTDVSTKAPLSASMIQRYNEHQMDLAQLKQFIRQKLSDKYNEVFSDVSKDGYAGYIDGKTNQEAFYKYLKGLLNKIEGSGYFLDKIEREDFLRKQRTFDNGSIPHQIHLQEMRAIIRRQAEFYPFLADNQDRIEKILTFRIPYYVGPLARGKSDFAWLSRKSADKITPWNFDEIVDKESSAEAFINRMTNYDLYLPNQKVLPKHSLLYEKFTVYNELTKVKYKTEQGKTAFFDANMKQEIFDGVFKVYRKVTKDKLMDFLEKEFDEFRIVDLTGLDKENKVFNASYGTYHDLCKILDKDFLDNSKNEKILEDIVLTLTLFEDREMIRKRLENYSDLLTKEQVKKLERRHYTGWGRLSAELIHGIRNKESRKTILDYLIDDGNSNRNFMQLINDDALSFKEEIAKAQVIGETDNLNQVVSDIAGSPAIKKGILQSLKIVDELVKIMGHQPENIVVEMARENQFTKQGRRNSQQRLKGLTDSIKEFGSQILKEHPVENSQLQNDRLFLYYLQNGRDMYTGEELDIDYLSQYDIDHIIPQAFIKDNSIDNRVLTSSKENRGKSDDVPSKDVVRKMKSYWSKLLSAKLITQRKFDNLTKAERGGLTDDDKAGFIKRQLVETRQITKHVARILDERFYTETDENNKKIRQVKIVTLKSNLVSNFRKEFELYKVREINDYHHAHDAYLNAVIGKALLGVYPQLEPEFVYGDYPHFHGHKENKATAKKFFYSNIMNFFKKDDVRTDKNGEIIWKKDEHISNIKKVLSYPQVNIVKKVEEQTGGFSKESILPKGNSDKLIPRKTKKFYWDTKKYGGFDSPIVAYSILVIADIEKGKSKKLKTVKALVGVTIMEKMTFERDPVAFLERKGYRNVQEENIIKLPKYSLFKLENGRKRLLASARELQKGNEIVLPNHLGTLLYHAKNIHKVDEPKHLDYVDKHKDEFKELLDVVSNFSKKYTLAEGNLEKIKELYAQNNGEDLKELASSFINLLTFTAIGAPATFKFFDKNIDRKRYTSTTEILNATLIHQSITGLYETRIDLSKLGGD

SEQ ID NO: 684 - protein, 1345 aa, Streptococcus mutans
MKKPYSIGLDIGTNSVGWAVVTDDYKVPAKKMKVLGNTDKSHIKKNLLGALLFDSGNTAADRRLKRTARRRYTRRRNRILYLQEIFAEEMSKVDDSFFHRLEDSFLVTEDKRGERHPIFGNLEEEVKYHENFPTIYHLRQYLADNPEKVDLRLVYLALAHIIKFRGHFLIEGKFDTRNNDVQRLFQEFLAVYDNTFENSSLQEQNVQVEEILTDKISKSAKKDRVLKLFPNEKSNGRFAEFLKLIVGNQADFKKHFELEEKAPLQFSKDTYEEELEVLLAQIGDNYAELFLSAKKLYDSILLSGILTVTDVSTKAPLSASMIQRYNEHQMDLAQLKQFIRQKLSDKYNEVFSDVSKDGYAGYIDGKTNQEAFYKYLKGLLNKIEGSGYFLDKIEREDFLRKQRTFDNGSIPHQIHLQEMRAIIRRQAEFYPFLADNQDRIEKILTFRIPYYVGPLARGKSDFAWLSRKSADKITPWNFDEIVDKESSAEAFINRMTNYDLYLPNQKVLPKHSLLYEKFTVYNELTKVKYKTEQGKTAFFDANMKQEIFDGVFKVYRKVTKDKLMDFLEKEFDEFRIVDLTGLDKENKAFNASYGTYHDLRKILDKDFLDNSKNEKILEDIVLTLTLFEDREMIRKRLENYSDLLTKEQVKKLERRHYTGWGRLSAELIHGIRNKESRKTILDYLIDDGNSNRNFMQLINDDALSFKEEIAKAQVIGETDNLNQVVSDIAGSPAIKKGILQSLKIVDELVKIMGHQPENIVVEMARENQFTNQGRRNSQQRLKGLTDSIKEFGSQILKEHPVENSQLQNDRLFLYYLQNGRDMYTGEELDIDYLSQYDIDHIIPQAFIKDNSIDNRVLTSSKENRGKSDDVPSKNVVRKMKSYWSKLLSAKLITQRKFDNLTKAERGGLTDDDKAGFIKRQLVETRQITKHVARILDERFHTETDENNKKIRQVKIVTLKSNLVSNFRKEFELYKVREINDYHHAHDAYLNAVIGKALLGVYPQLEPEFVYGDYPHFHGHKENKATAKKFFYSNIMNFFKKDDVRTDKNGEIIWKKDEHISNIKKVLSYPQVNIVKKVEEQTGGFSKESILPKGNSDKLIPRKTKKFYWDTKKYGGFDSPIVAYSILVIADIEKGKSKKLKTVKALVGVTIMEKMTFERDPVAFLERKGYRNVQEENIIKLPKYSLFKLENGRKRLLASARELQKGNEIVLPNHLGTLLYHAKNIHKVDEPKHLDYVDKHKDEFKELLDVVSNFSKKYTLAEGNLEKIKELYAQNNGEDLKELSSSFINLLTFTAIGAPAAFKFFDKNIDRKRYTSTTEILNATLIHQSITGLYETRIDLSKLGGD

SEQ ID NO: 685 - protein, 1345 aa, Streptococcus mutans; identical to SEQ ID NO: 681

SEQ ID NO: 686 - protein, 1345 aa, Streptococcus mutans; identical to SEQ ID NO: 682

SEQ ID NO: 687 - protein, 1345 aa, Streptococcus mutans; identical to SEQ ID NO: 683

SEQ ID NO: 688 - protein, 1345 aa, Streptococcus mutans; identical to SEQ ID NO: 684

SEQ ID NO: 689 - protein, 1345 aa, Streptococcus mutans; identical to SEQ ID NO: 682

SEQ ID NO: 690 - protein, 1345 aa, Streptococcus mutans; identical to SEQ ID NO: 682

SEQ ID NO: 691 - protein, 1345 aa, Streptococcus mutans; identical to SEQ ID NO: 682

SEQ ID NO: 692 - protein, 1345 aa, Streptococcus mutans; identical to SEQ ID NO: 682

SEQ ID NO: 693 - protein, 1359 aa, Streptococcus mutans
MKKPYSIGLDIGTNSVGWAVVTDDYKVPAKKMKVLGNTDKSHIKKNLLGALLFDSGNTAEDRRLKRTARRRYTRRRNRILYLQEIFAEEMMQVDESFFQRLDDSFLVEEDKRGSRYPIFGTLKEEKKYHKEFKTIYHLREKLANSTEKADLRLVYLSLAHMIKFRGHFLIEGQLKAENTNVQALFKDFVEVYDKTVEESHLSEMTVDALSILTEKVSKSRRLENLVECYPTEKKNTLFGNLIALSLGLQPNFKTNFQLSEDAKLQFSKDTYEEDLEGLLGEIGDEYADLFASAKNLYDAILLSGILAVDDNTTKAPLSASMVKRYKEHKEELAAFKRFIKEKLPKKYEEIFKDDTKNGYAGYVGADKKLRKRSGKLATEEEFYKYVKGILNKVEGADVWLDKIDREDFLRKQRTFDNGSIPHQIHLQEMHAILRRQGEHYPFLKENQDKIEKILTFRIPYYVGPLVRKGSRFAWAEYKADEKITPWNFDDILDKEKSAEKFITRMTLNDLYLPEEKVLPKHSLLYETFTVYNELTKVKYVNEQGEAKFFDANMKQEIFDHVFKENRKVTKDKLLNYLNKEFEEFRIVNLTGLDKENKVFNSSLGTYHDLRKILNKSFLDNKENEQIIEDIIQTLTLFEDREMIRQRLQKYSDIFTKAQLKKLERRHYTGWGRLSYKLINGIRDKQSNKTILGYLIDDGYSNRNFMQLINDDALSFKEEIAKAQVIGEMDGLNQVVSDIAGSPAIKKGILQSLKIVDELVKVMGHNPANIVIEMARENQTTAKGRRSSQKRYKRLEEAIKNLDHDLNHKILKEHPTDNQALQNDRLFLYYLQNGRDMYTEDPLDINRLSDYDIDHIIPQAFIKDNSIDNRVLTRSDKNRGKSDDVPSEEVVHKMKPFWSKLLSAKLITQRKFDNLTKAERGGLTDDDKAGFIKRQLVETRQITKHVARILDERFNTETDENNKKIRQVKIVTLKSNLVSNFRKEFELYKVREINDYHHAHDAYLNAVIGKALLGVYPQLEPEFVYGDYPHFHGHKENKATAKKFFYSNIMNFFKKGDVRTDKNGEIIWKKDEHISNIKKVLSYPQVNIVKKVEEQTGGFSKESILPKGNSDKLIPRKTKKFYWDTKKYGGFDSPIVAYSILVIADIEKGKSKKLKTVKALVGVTIMEKMTFERDPVAFLERKGYRNVQEENIIKLPKYSLFKLENGRKRLLASARELQKGNEIVLPNHLETLLYHAKNIHKVDEPKHLDYVDKHKDEFKELLDVVSNFSKKYTLAEGNLEKIKELYAQNNGEDLKELASSFINLLTFTAIGAPAAFKFFDKNIDRKRYTSTTEILNATLIHQSITGLYETRIDLNKLGGD

SEQ ID NO: 694 - protein, 1359 aa, Streptococcus mutans; identical to SEQ ID NO: 693

SEQ ID NO: 695 - protein, 1355 aa, Streptococcus mutans
MKKPYSIGLDIGTNSVGWAVVTDDYKVPAKKMKVLGNTDKSHIKKNLLGALLFDSGNTAEDRRLKRTARRRYTRRRNRILYLQEIFAEEMSKVDDSFFHRLDESFLTDDDKNFDSHPIFGNKAEEDAYHQKFPTIYHLRKHLADSTEKADLRLVYLALAHMIKFRGHFLIEGELNAENTDVQKLFADFVGVYDRTFDDSHLSEITVDASSILTEKISKSRRLEKLINNYPKEKKNTLFGNLIALSLGLQPNFKTNFKLSEDAKLQFSKDTYEEDLEELLGKIGDDYADLFTLAKNLYDAILLSGILTADDSSTKAPLSASMIKRYAEHHEDLEKLKEFIKANKPELYHDIFKDETKNGYAGYIENGVKQDEFYKYLKNTLSKITGSDYFLDQIEREDFLRKQRTFDNGSIPHQIHLQEMHAILRRQGDYYPFLKENQDRIEKILTFRIPYYVGPLARKNSRFAWAEYHSDEAVTPWNFDQVIDKESSAQAFIEHMTNNDLYLPNEKVLPKHSPLYEKYTVYNELTKIKYVTEIGEAKFFDANLKQEIFDGLFKHERKVTKKKLRTFLDKNFDEFRIVDIQGLDKETETFNASYATYQDLLKVIKDKVFMDNPENAEILENIVLTLTLFEDREMIKQRLAKYADVFDKKVIDQLARRHYTGWGRLSAKLLNGIRDKQSCKTIMDYLIDDAQSNRNLMQLITDDNLTFKDDIVKAQYVDNSDDLHQVVQSLAGSPAIKKGILQSLKIVDELVKVMGKEPEQIVVEMARENQTTAKGRRNSQQRYKRLKEAIKSLDRDLNHKILKEHPTDNQALQNNRLFLYYLQNGRDMYTGESLDINRLSDYDIDHVIPQAFIKDNSIDNRVLTSSKANRGKSDDVPSEDVVNRMRPFWNKLLSSGLISQRKYNNLTKKELTLDDKAGFIKRQLVETRQITKHVARMLDERFNKEFDDNNKRIRRVKIVTLKSNLVSSFRKEFELYKVREINDYHHAHDAYLNAVVVKALLVKYPKLEPEFVYGEYPKYNSYRERKTATQKMFFYSNIMNMFKSKVKLADDQIVERPMIEVNDETGEIAWDKTKHITTVKKVLSYPQVNIVKKVEEQTIGQNGGLFDDNPKSPLEVIPSKLVPLKKALNPEKYGGYQKPTTAYPILLIVDTKQLIPISVMDKKRFEQNPVKFLKDKGYQQIEKNNFVKLPKYTLVDIGNGIKRLWASSKEVHKGNQLVVSKKSQDLLYHAHHLDNDYSNEYVKNHYQQFDILFNEITSFSKKCKLGKEHIQKIEEAYSKERDFASIEELADGFIKLLGFTQLGATSPFSFLGIKLNQKQYTGKKDYLLPCMEATLIHQSITGLYETRIDLSKLGGD

SEQ ID NO: 696 - protein, 1355 aa, Streptococcus mutans; identical to SEQ ID NO: 695

SEQ ID NO: 697 - protein, 1345 aa, Streptococcus mutans
MKKPYSIGLDIGTNSVGWAVVTDDYKVPAKKMKVLGNTDKSHIKKNLLGALLFDSGNTAEDRRLKRTARRRYTRRRNRILYLQEIFSEEMDKVDDSFFHRLEDSFLVTEDKRGERHPIFGNLEEEVKYHENFPTIYHLRQYLADNPEKVDLRLVYLALAHIIKFRGHFLIEGKFDTRNNDVQRLFQEFLAVYDNTFENSSLQEQNVQVEEILTDKISKSAKKDRVLKLFPNEKSNGRFAEFLKLIVGNQADFKKHFELEEKAPLQFSKDTYEEELEVLLAQIGDNYAELFLSAKKLYDSILLSGILTVTDVSTKAPLSASMIQRYNEHQMDLAQLKQFIRQKLSDKYNEVFSDVSKDGYAGYIDGKTNQEAFYKYLKGLLNKIEGSGYFLDKIEREDFLRKQRTFDNGSIPHQIHLQEMRAIIRRQAEFYPFLADNQDRIEKILTFRIPYYVGPLARGKSDFAWLSRKSADKITPWNFDEIVDKESSAEAFINRMTNYDLYLPNQKVLPKHSLLYEKFTVYNELTKVKYKTEQGKTAFFDANMKQEIFDGVFKVYRKVTKDKLMDFLEKEFDEFRIVDLTGLDKENKVFNASYGTYHDLCKILDKDFLDNSKNEKILEDIVLTLTLFEDREMIRKRLENYSDLLTKEQVKKLERRHYTGWGRLSAELIHGIRNKESRKTILDYLIDDGNSNRNFMQLINDDALSFKEEIAKAQVIGETDNLNQVVSDIAGSPAIKKGILQSLKIVDELVKIMGHQPENIVVEMARENQFTKQGRRNSQQRLKGLTDSIKEFGSQILKEHPVENSQLQNDRLFLYYLQNGRDMYTGEELDIDYLSQYDIDHIIPQAFIKDNSIDNRVLTSSKENRGKSDDVPSKDVVRKMKSYWSKLLSAKLITQRKFDNLTKAERGGLTDDDKAGFIKRQLVETRQITKHVARILDERFYTETDENNKKIRQVKIVTLKSNLVSNFRKEFELYKVREINDYHHAHDAYLNAVIGKALLGVYPQLEPEFVYGDYPHFHGHKENKATAKKFFYSNIMNFFKKDDVRTDKNGEIIWKKDEHISNIKKVLSYPQVNIVKKVEEQTGGFSKESILPKGNSDKLIPRKTKKFYWDTKKYGGFDSPIVAYSILVIADIEKGKSKKLKTVKALVGVTIMEKMTFERDPVAFLERKGYRNVQEENIIKLPKYSLFKLENGRKRLLASARELQKGNEIVLPNHLGTLLYHAKNIHKVDEPKHLDYVDKHKDEFKELLDVVSNFSKKYTLAEGNLEKIKELYAQNNGEDLKELASSFINLLTFTAIGAPATFKFFDKNIDRKRYTSTTEILNATLIHQSITGLYETRIDLSKLGGD

SEQ ID NO: 698 - protein, 1345 aa, Streptococcus mutans; identical to SEQ ID NO: 697

SEQ ID NO: 699 - protein, 1345 aa, Streptococcus mutans
MKKPYSIGLDIGTNSVGWAVVTDDYKVPAKKMKVLGNTDKSHIKKNLLGALLFDSGNTAEDRRLKRTARRRYTRRRNRILYLQEIFSEEMGKVDDSFFHRLDESFLTDDDKNFDSHPIFGNKAEEDAYHQKFPTIYHLRKHLADSTEKADLRLVYLALAHMIKFRGHFLIEGELNAENTDVQKLFADFVGVYDRTFDDSHLSEITVDASSILTEKISKSRRLEKLINNYPKEKKNTLFGNLIALSLGLQPNFKTNFKLSEDAKLQFSKDTYEEELEVLLAQIGDNYAELFLSAKKLYDSILLSGILTVTDVSTKAPLSASMIQRYNEHQMDLAQLKQFIRQKLSDKYNEVFSDVSKDGYAGYIDGKTNQEAFYKYLKGLLNKIEGSGYFLDKIEREDFLRKQRTFDNGSIPHQIHLQEMRAIIRRQAEFYPFLADNQDRIEKILTFRIPYYVGPLARGKSDFAWLSRKSADKITPWNFDEIVDKESSVEAFINRMTNYDLYLPNQKVLPKHSLLYEKFTVYNELTKVKYKTEQGKTAFFDANMKQEIFDGVFKVYRKVTKDKLMDFLEKEFDEFRIVDLTGLDKENKAFNASYGTYHDLRKILDKDFLDNSKNEKILEDIVLTLTLFEDREMIRKRLKNYSDLLTKEQLKKLERRHYTGWGRLSAELIHGIRNKESRKTILDYLIDDGNSNRNFMQLINDDALSFKEEIAKAQVIGETDNLNQVVSDIAGSPAIKKGILQSLKIVDELVKIMGHQPENIVVEMARENQFTNQGRRNSQQRLKGLTDSIKEFGSQILKEHPVENSQLQNDRLFLYYLQNGRDMYTGEELDIDYLSQYDIDHIIPQAFIKDNSIDNRVLTSSKENRGKSDDVPSKDVVRKMKSYWSKLLSAKLITQRKFDNLTKGERGGLTDDDKAGFIKRQLVETRQITKHVARILDERFNTETDENNKKIRQVKIVTLKSNLVSNFRKEFELYKVREINDYHHAHDAYLNAVIGKALLGVYPQLEPEFVYGDYPHFHGHKENKATAKKFFYSNIMNFFKKDDVRTDKNGEIIWKKDEYISNIKKVLSYPQVNIVKKVEEQTGGFSKESILPKGDSDKLIPRKTKKFYWDTKKYGGFDSPIVAYSILVIADIEKGKSKKLKTVKALVGVTIMEKMTFERDPVAFLERKGYRNVQEENIIKLPKYSLFKLENGRKRLLASARELQKGNEIVLPNHLGTLLYHAKNIHKVDEPKHLDYVDKHKDEFKELLDVVSNFSKKYTLAEGNLEKIKELYAQNNGEDLKELASSFINLLTFTAIGAPATFKFFDKNIDRKRYTSTTEILNATLIHQSITGLYETRIDLSKLGGD

SEQ ID NO: 700 - protein, 1345 aa, Streptococcus mutans
MKKPYSIGLDIGTNSVGWAVVTDDYKVPAKKMKVLGNTDKSHIKKNLLGALLFDSGNTAEDRRLKRTARRRYTRRRNRILYLQEIFSEEMGKVDDSFFHRLDESFLTDDDKNFDSYPIFGNKAEEDAYHQKFPTIYHLRKHLADSTEKADLRLVYLALAHMIKFRGHFLIEGELNAENTDVQKLFADFVGVYDRTFDDSHLSEITVDASSILTEKISKSRRLEKLINNYPKEKKNTLFRNLVALSLGLQPNFKTNFKLSEDAKLQFSKDTYEEDLEELLGKIGDDYADLFTLAKNLYDAILLSGILTADDSSTKAPLSASMIKRYAEHHEDLEKLKEFIKANKPELYHDIFKDETKNGYAGYIENGVKQDEFYKYLKNTLSKIAGSDYFLDKIEREDFLRKQRTFDNGSIPHQIHLQEMHAILRRQGDYYPFLKENQDRIEKILTFRIPYYVGPLARGKSDFAWLSRKSADKITPWNFDEIVDKESSVEAFINRMTNYDLYLPNQKVLPKHSLLYEKFTVYNELTKVKYKTEQGKTAFFDANMKQEIFDGVFKVYRKVTKDKLMDFLEKEFDEFRIVDLTGLDKENKAFNASYGTYHDLRKILDKDFLDNSKNEKILEDIVLTLTLFEDREMIRKRLKNYSDLLTKEQLKKLERRHYTGWGRLSAELIHGIRNKESRKTILDYLIDDGNSNRNFMQLINDDALSFKEEIAKAQVIGETDNLNQVVSDIAGSPAIKKGILQSLKIVDELVKIMGHQPENIVVEMARENQFTNQGRRNSQQRLKGLTDSIKEFGSQILKEHPVENSQLQNDRLFLYYLQNGRDMYTGEELDIDYLSQYDIDHIIPQAFIKDNSIDNRVLTSSKENRGKSDDVPSKDVVRKMKSYWSKLLSAKLITQRKFDNLTKGERGGLTDDDKAGFIKRQLVETRQITKHVARILDERFNTETDENNKKIRQVKIVTLKSNLVSNFRKEFELYKVREINDYHHAHDAYLNAVIGKALLGVYPQLEPEFVYGDYPHFHGHKENKATAKKFFYSNIMNFFKKDDVRTDKNGEIIWKKDEYISNIKKVLSYPQVNIVKKVEEQTGGFSKESILPKGDSDKLIPRKTKKFYWDTKKYGGFDSPIVAYSILVIADIEKGKSKKLKTVKALVGVTIMEKMTFERDPVAFLERKGYRNVQEENIIKLPKYSLFKLENGRKRLLASARELQKGNEIVLPNHLGTLLYHAKNIHKVDEPKHLDYVDKHKDEFKELLDVVSNFSKKYTLAEGNLEKIKELYAQNNGEDLKELASSFINLLTFTAIGAPATFKFFDKNIDRKRYTSTTEILNATLIHQSITGLYETRIDLSKLGGD

SEQ ID NO: 701 - protein, 1345 aa, Streptococcus mutans; identical to SEQ ID NO: 700

SEQ ID NO: 702 - protein, 1345 aa, Streptococcus mutans
MKKPYSIGLDIGTNSVGWAVVTDDYKVPAKKMKVLGNTDKSHIKKNLLGALLFDSGNTAEDRRLKRTARRRYTRRRNRILYLQEIFSEEMGKVDDSFFHRLEDSFLVTEDKRGERHPIFGNLEEEVKYHENFPTIYHLRQYLADNPEKTDLRLVYLALAHIIKFGGHFLIEGKFDTRNNDVQRLFQEFLAVYDNTFENSSLQEQNVQVEEILTDKISKSAKKDRVLKLFPNEKSNGRFAEFLKLIVGNQADFKKHFELEEKAPLQFSKDIYEEELEVLLAQIGDNYAELFLSAKKLYDSILLSGILTVTDVSTKAPLSASMIQRYNEHQMDLAQLKQFIRQKLSDKYNEVFSDVSKDGYAGYIDGKTNQEAFYKYLKGLLNKIEGSGYFLDKIEREDFLRKQRTFDNGSIPHQIHLQEMRAIIRRQAEFYPFLADNQDRIEKILTFRIPYYVGPLARGKSDFAWLSRKSADKITPWNFDEIVDKESSVEAFINRMTNYDLYLPNQKVLPKHSLLYEKFTVYNELTKVKYKTEQGKTAFFDANMKQEIFDGVFKVYRKVTKDKLMDFLEKEFDEFRIVDLTGLDKENKAFNASYGTYHDLRKILDKDFLDNSKNEKILEDIVLTLTLFEDREMIRKRLKNYSDLLTKEQLKKLERRHYTGWGRLSAELIHGIRNKESRKTILDYLIDDGNSNRNFMQLINDDALSFKEEIAKAQVIGETDNLNQVVSDIAGSPAIKKGILQSLKIVDELVKIMGHQPENIVVEMARENQFTNQGRRNSQQRLKGLTDSIKEFGSQILKEHPVENSQLQNDRLFLYYLQNGRDMYTGEELDIDYLSQYDIDHIIPQAFIKDNSIDNRVLTSSKENRGKSDDVPSKNVVRKMKSYWSKLLSAKLITQRKFDNLTKAERGGLTDDDKAGFIKRQLVETRQITKHVARILDERFHTETDENNKKIRQVKIVTLKSNLVSNFRKEFELYKVREINDYHHAHDAYLNAVIGKALLGVYPQLEPEFVYGDYPHFHGHKENKATAKKFFYSNIMNFFKKDDVRTDKNGEIIWKKDEHISNIKKVLSYPQVNIVKKVEEQTGGFSKESILPKGNSDKLIPRKTKKFYWDTKKYGGFDSPIVAYSILVIADIEKGKSKKLKTVKALVGVTIMEKMTFERDPVAFLERKGYRNVQEENIIKLPKYSLFKLENGRKRLLASARELQKGNEIVLPNHLGTLLYHAKNIHKVDEPKHLDYVDKHKDEFKELLDVVSNFSKKYTLAEGNLEKIKELYAQNNGEDLKELASSFINLLTFTAIGAPATFKFFDKNIDRKRYTSTTEILNATLIHQSITGLYETRIDLSKLGGD

SEQ ID NO: 703 - protein, 1345 aa, Streptococcus mutans; identical to SEQ ID NO: 702

SEQ ID NO: 704 - protein, 1345 aa, Streptococcus mutans
MKKPYSIGLDIGTNSVGWAVVTDDYKVPAKKMKVLGNTDKSHIKKNLLGALLFDSGNTAEDRRLKRTARRRYTRRRNRILYLQEIFSEEMGKVDDSFFHRLEDSFLVTEDKRGERHPIFGNLEEEVKYHENFPTIYHLRQYLADNPEKTDLRLVYLALAHIIKFRGHFLIEGKFDTRNNDVQRLFQEFLAVYDNTFENSSLQEQNVQVEEILTDKISKSAKKDRVLKLFPNEKSNGRFAEFLKLIVGNQADFKKHFELEEKAPLQFSKDIYEEELEVLLAQIGDNYAELFLSAKKLYDSILLSGILTVTDVSTKAPLSASMIQRYNEHQMDLAQLKQFIRQKLSDKYNEVFSDVSKDGYAGYIDGKTNQEAFYKYLKGLLNKIEGSGYFLDKIEREDFLRKQRTFDNGSIPHQIHLQEMRAIIRRQAEFYPFLADNQDRIEKILTFRIPYYVGPLARGKSDFAWLSRKSADKITPWNFDEIVDKESSVEAFINRMTNYDLYLPNQKVLPKHSLLYEKFTVYNELTKVKYKTEQGKTAFFDANMKQEIFDGVFKVYRKVTKDKLMDFLEKEFDEFRIVDLTGLDKENKAFNASYGTYHDLRKILDKDFLDNSKNEKILEDIVLTLTLFEDREMIRKRLKNYSDLLTKEQLKKLERRHYTGWGRLSAELIHGIRNKESRKTILDYLIDDGNSNRNFMQLINDDALSFKEEIAKAQVIGETDNLNQVVSDIAGSPAIKKGILQSLKIVDELVKIMGHQPENIVVEMARENQFTNQGRRNSQQRLKGLTDSIKEFGSQILKEHPVENSQLQNDRLFLYYLQNGRDMYTGEELDIDYLSQYDIDHIIPQAFIKDNSIDNRVLTSSKENRGKSDDVPSKNVVRKMKSYWSKLLSAKLITQRKFDNLTKAERGGLTDDDKAGFIKRQLVETRQITKHVARILDERFHTETDENNKKIRQVKIVTLKSNLVSNFRKEFELYKVREINDYHHAHDAYLNAVIGKALLGVYPQLEPEFVYGDYPHFHGHKENKATAKKFFYSNIMNFFKKDDVRTDKNGEIIWKKDEHISNIKKVLSYPQVNIVKKVEEQTGGFSKESILPKGNSDKLIPRKTKKFYWDTKKYGGFDSPIVAYSILVIADIEKGKSKKLKTVKALVGVTIMEKMTFERDPVAFLERKGYRNVQEENIIKLPKYSLFKLENGRKRLLASARELQKGNEIVLPNHLGTLLYHAKNIHKVDEPKHLDYVDKHKDEFKELLDVVSNFSKKYTLAEGNLEKIKELYAQNNGEDLKELASSFINLLTFTAIGAPATFKFFDKNIDRKRYTSTTEILNATLIHQSITGLYETRIDLSKLGGD

SEQ ID NO: 705 - protein, 1345 aa, Streptococcus mutans
MKKPYSIGLDIGTNSVGWAVVTDDYKVPAKKMKVLGNTDKSHIKKNLLGALLFDSGNTAEDRRLKRTARRRYTRRRNRILYLQEIFSEEMGKVDDSFFHRLEDSFLVTEDKRGERHPIFGNLEEEVKYHENFPTIYHLRQYLADNPEKTDLRLVYLALAHIIKFRGHFLIEGKFDTRNNDVQRLFQEFLAVYDNTFENSSLQEQNVQVEEILTDKISKSAKKDRVLKLFPNEKSNGRFAEFLKLIVGNQADFKKHFELEEKAPLQFSKDIYEEELEVLLAQIGDNYAELFLSAKKLYDSILLSGILTVTDVSTKAPLSASMIQRYNEHQMDLAQLKQFIRQKLSDKYNEVFSDVSKDGYAGYIDGKTNQEAFYKYLKGLLNKIEGSGYFLDKIEREDFLRKQRTFDNGSIPHQIHLQEMRAIIRRQAEFYPFLADNQDRIEKILTFRIPYYVGPLARGKSDFAWLSRKSADKITPWNFDEIVDKESSVEAFINRMTNYDLYLPNQKVLPKHSLLYEKFTVYNELTKVKYKTEQGKTAFFDANMKQEIFDGVFKVYRKVTKDKLMDFLEKEFDEFRIVDLTGLDKENKAFNASYGTYHDLRKILDKDFLDNSKNEKILEDIVLTLTLFEDREMIRKRLKNYSDLLTKEQLKKLERRHYTGWGRLSAELIHGIRNKESRKTILDYLIDDGNSNRNFMQLINDDALSFKEEIAKAQVIGETDNLNQVVSDIAGSPAIKKGILQSLKIVDELVKIMGHQPENIVVEMARENQFTNQGRRNSQQRLKGLTDSIKEFGSQILKEHPVENSQLQNDRLFLYYLQNGRDMYTGEELDIDYLSQYDIDHIIPQAFIKDNSIDNRVLTSSKENRGKSDDVPSKDVVRKMKSYWSKLLSAKLITQRKFDNLTKAERGGLTDDDKAGFIKRQLVETRQITKHVARILDERFNTETDENNKKIRQVKIVTLKSNLVSNFRKEFELYKVREINDYHHAHDAYLNAVIGKALLGVYPQLEPEFVYGDYPHFHGHKENKATAKKFFYSNIMNFFKKDDVRTDKNGEIIWKKDEHISNIKKVLSYPQVNIVKKVEEQTGGFSKESILPKGNSYKLIPRKTKKFYWDTKKYGGFDSPIVAYSILVIADIEKGKSKKLKTVKALVGVTIMEKMTFERDPVAFLERKGYRNVQEENIIKLPKYSLFKLENGRKRLLASARELQKGNEIVLPNHLGTLLYHAKNIHKVDEPKHLDYVDKHKDEFKELLDVVSNFSKKYTLAEGNLEKIKELYAQNNGEDLKELASSFINLLTFTAIGAPAAFKFFDKNIDRKRYTSTTEILNATLIHQSITGLYETRIDLSKLGGD

SEQ ID NO: 706 - protein, 1345 aa, Streptococcus mutans
MKKPYSIGLDIGTNSVGWAVVTDDYKVPAKKMKVLGNTDKSHIKKNLLGALLFDSGNTAEDRRLKRTARRRYTRRRNRILYLQEIFSEEMGKVDDSFFHRLEDSFLVTEDKRGERHPIFGNLEEEVKYHENFPTIYHLRQYLADNPEKTDLRLVYLALAHIIKFRGHFLIEGKFDTRNNDVQRLFQEFLAVYDNTFENSSLQEQNVQVEEILTDKISKSAKKDRVLKLFPNEKSNGRFAEFLKLIVGNQADFKKHFELEEKAPLQFSKDIYEEELEVLLAQIGDNYAELFLSAKKLYDSILLSGILTVTDVSTKAPLSASMIQRYNEHQMDLAQLKQFIRQKLSDKYNEVFSDVSKDGYAGYIDGKTNQEAFYKYLKGLLNKIEGSGYFLDKIEREDFLRKQRTFDNGSIPHQIHLQEMRAIIRRQAEFYPFLADNQDRIEKILTFRIPYYVGPLARGKSDFAWLSRKSADKITPWNFDEIVDKESSAEAFINRMTNYDLYLPNQKVLPKHSLLYEKFTVYNELTKVKYKTEQGKTAFFDANMKQEIFDGVFKVYRKVTKDKLMDFLEKEFDEFRIVDLTGLDKENKAFNASYGTYHDLRKILDKDFLDNSKNEKILEDIVLTLTLFEDREMIRKRLKNYSDLLTKEQLKKLERRHYTGWGRLSAELIHGIRNKESRKTILDYLIDDGNSNRNFMQLINDDALSFKEEIAKAQVIGETDNLNQVVSDIAGSLAIKKGILQSLKIVDELVKIMGHQPENIVVEMARENQFTNQGRRNSQQRLKGLTDSIKEFGSQILKEHPVENSQLQNDRLFLYYLQNGRDMYTGEELDIDYLSQYDIDHIIPQAFIKDNSIDNRVLTSSKENRGKSDDVPSKDVVRKMKSYWSKLLSAKLITQRKFDNLTKGERGGLTDDDKAGFIKRQLVETRQITKHVARILDERFNTETDENNKKIRQVKIVTLKSNLVSNFRKEFELYKVREINDYHHAHDAYLNAVIGKALLGVYPQLEPEFVYGDYPHFHGHKENKATAKKFFYSNIMNFFKKDDVRTDKNGEIIWKKDEYISNIKKVLSYPQVNIVKKVEEQTGGFFKESILPKGDSDKLIPRKTKKFYWDTKKYGGFDSPIVAYSILVIADIEKGKSKKLKTVKALVGVTIMEKMTFERDPVAFLERKGYRNVQEENIIKLPKYSLFKLENGRKRLLASARELQKGNEIVLPNHLGTLLYHAKNIHKVDEPKHLDYVDKHKDEFKELLDVVSNFSKKYTLAEGNLEKIKELYAQNNGEDLKELASSFINLLTFTAIGAPATFKFFDKNIDRKRYTSTTEILNATLIHQSITGLYETRIDLSKLGGD

SEQ ID NO: 707 - protein, 1345 aa, Streptococcus mutans
MKKPYSIGLDIGTNSVGWAVVTDDYKVPAKKMKVLGNTDKSHIKKNLLGALLFDSGNTAEDRRLKRTARRRYTRRRNRILYLQEIFSEEMGKVDDSFFHRLEDSFLVTEDKRGERHPIFGNLEEEVKYHENFPTIYHLRQYLADNPEKTDLRLVYLALAHIIKFRGHFLIEGKFDTRNNDVQRLFQEFLAVYDNTFENSSLQEQNVQVEEILTDKISKSAKKDRVLKLFPNEKSNGRFAEFLKLIVGNQADFKKHFELEEKAPLQFSKDIYEEELEVLLAQIGDNYAELFLSAKKLYDSILLSGILTVTDVSTKAPLSASMIQRYNEHQMDLAQLKQFIRQKLSDKYNEVFSDVSKDGYAGYIDGKTNQEAFYKYLKGLLNKIEGSGYFLDKIEREDFLRKQRTFDNGSIPHQIHLQEMRAIIRRQAEFYPFLADNQDRIEKILTFRIPYYVGPLARGKSDFAWLSRKSADKITPWNFDEIVDKESSVEAFINRMTNYDLYLPNQKVLPKHSLLYEKFTVYNELTKVKYKTEQGKTAFFDANMKQEIFDGVFKVYRKVTKDKLMDFLEKEFDEFRIVDLTGLDKENKAFNASYGTYHDLRKILDKDFLDNSKNEKILEDIVLTLTLFEDREMIRKRLKNYSDLLTKEQLKKLERRHYTGWGRLSAELIHGIRNKESRKTILDYLIDDGNSNRNFMQLINDDALSFKEEIAKAQVIGETDNLNQVVSDIAGSPAIKKGILQSLKIVDELVKIMGHQPENIVVEMARENQFTNQGRRNSQQRLKGLTDSIKEFGSQILKEHPVENSQLQNDRLFLYYLQNGRDMYTGEELDIDYLSQYDIDHIIPQAFIKDNSIDNRVLTSSKENRGKSDDVPSKDVVRKMKSYWSKLLSAKLITQRKFDNLTKAERGGLTDDDKAGFIKRQLVETRQITKHVARILDERFNTETDENNKKIRQVKIVTLKSNLVSNFRKEFELYKVREINDYHHAHDAYLNAVIGKALLGVYPQLEPEFVYGDYPHFHGHKENKATAKKFFYSNIMNFFKKDDVRTDKNGEIIWKKDEHISNIKKVLSYPQVNIVKKVEEQTGGFSKESILPKGNSDKLIPRKTKKFYWDTKKYGGFDSPIVAYSILVIADIEKGKSKKLKTVKALVGVTIMEKMTFERDPVAFLERKGYRNVQEENIIKLPKYSLFKLENGRKRLLASARELQKGNEIVLPNHLGTLLYHAKNIHKVDEPKHLDYVDKHKDEFKELLDVVSNFSKKYTLAEGNLEKIKELYAQNNGEDLKELASSFINLLTFTAIGAPATFKFFDKNIDRKRYTSTTEILNATLIHQSITGLYETRIDLNKLGGD

SEQ ID NO: 708 - protein, 1345 aa, Streptococcus mutans; identical to SEQ ID NO: 707

SEQ ID NO: 709 - protein, 1345 aa, Streptococcus mutans; identical to SEQ ID NO: 704

SEQ ID NO: 710 - protein, 1345 aa, Streptococcus mutans; identical to SEQ ID NO: 705

SEQ ID NO: 711 - protein, 1345 aa, Streptococcus mutans; identical to SEQ ID NO: 706

SEQ ID NO: 712 - protein, 1345 aa, Streptococcus mutans
MKKPYSIGLDIGTNSVGWAVVTDDYKVPAKKMKVLGNTDKSHIKKNLLGALLFDSGNTAEDRRLKRTARRRYTRRRNRILYLQEIFSEEMGKVDDSFFHRLEDSFLVTEDKRGERHPIFGNLEEEVKYHENFPTIYHLRQYLADNPEKVDLRLVYLALAHIIKFRGHFLIEGKFDTRNNDVQKLFQEFLAVYDNTFENSSLQEQNVQVEEILTDKISKSAKKDRVLKLFPNEKSNGRFAEFLKLIVGNQADFKKHFELEEKAPLQLSKDTYEEELEVLLAQIGDNYAELFLSAKKLYDSILLSGILTVTDVSTKAPLSASMIQRYNEHQMDLAQLKQFIRQKLSDKYNEVFSDVSKDGYAGYIDGKTNQEAFYKYLKGLLNKIEGSGYFLDKIEREDFLRKQRTFDNGSIPHQIHLQEMRAIIRRQAEFYPFLADNQDRIEKILTFRIPYYVGPLARGKSDFAWLSRKSADKITPWNFDEIVDKESSVEAFINRMTNYDLYLPNQKVLPKHSLLYEKFTVYNELTKVKYKTEQGKTAFFDANMKQEIFDGVFKVYRKVTKDKLMDFLEKEFDEFRIVDLTGLDKENKAFNASYGTYHDLRKILDKDFLDNSKNEKILEDIVLTLTLFEDREMIRKRLENYSDLLTKEQVKKLERRHYTGWGRLSAELIHGIRNKESRKTLLDYLIDDGNSNRNFMQLINDDALSFKEEIAKAQVIGETDNLNQVVSDIAGSPAIKKGILQSLKIVDELVKIMGHQPENIVVEMARENQFTNQGRRNSQQRLKGLTDSIKEFGSQILKEHPVENSQLQNDRLFLYYLQNGRDMYTGEELDIDYLSQYDIDHIIPQAFIKDNSIDNRVLTSSKENRGKSDDVPSKDVVRKMKSYWSKLLSAKLITQRKFDNLTKAERGGLTDDDKAGFIKRQLVETRQITKHVARILDERFNTETDENNKKIRQVKIVTLKSNLVSNFRKEFELYKVREINDYHHAHDAYLNAVIGKALLGVYPQLEPEFVYGDYPHFHGHKENKATAKKFFYSNIMNFFKKDDVRTDKNGEIIWKKDEYISNIKKVLSYPQVNIVKKVEEQTGGFSKESILPKGNSDKLIPRKTKKFYWDTKKYGGFDSPIVAYSILVIADIEKGKSKKLKTVKALVGVTIMEKMTFERDPIAFLERKGYRNVQEENIIKLPKYSLFKLENGRKRLLASARELQKGNEIVLPNHLGTLLYHAKNIHKVDEPKHLDYVDKHKDEFKELLDVVSNFSKKYTLAEGNLEKIKELYAQNNGEDLKELASSFINLLTFTAIGAPATFKFFDKNIDRKRYTSTTEILNATLIHQSITGLYETRIDLSKLGGD

SEQ ID NO: 713 - protein, 1345 aa, Streptococcus mutans; identical to SEQ ID NO: 712

SEQ ID NO: 714 - protein, 1345 aa, Streptococcus mutans
MKKPYSIGLDIGTNSVGWAVVTDDYKVPAKKMKVLGNTDKSHIKKNLLGALLFDSGNTAEDRRLKRTARRRYTRRRNRILYLQEIFSEEMGKVDDSFFHRLEDSFLVTEDKRGERHPIFGNLEEEVKYHENFPTIYHLRQYLADNPEKVDLRLVYLALAHIIKFRGHFLIEGKFDTRNNDVQRLFQEFLAVYDNTFENSSLQEQNVQVEEILTDKISKSAKKDRVLKLFPNEKSNGRFAEFLKLIVGNQADFKKHFELEEKAPLQFSKDTYEEDLEELLGKIGDDYADLFTLAKNLYDAILLSGILTADDSSTKAPLSASMIQRYNEHQMDLAQLKQFIRQKLSDKYNEVFSDVSKDGYAGYIDGKTNQEAFYKYLKGLLNKIEGSGYFLDKIEREDFLRKQRTFDNGSIPHQIHLQEMRAIIRRQAEFYPFLADNQDRIEKILTFRIPYYVGPLARGKSDFAWLSRKSADKITPWNFDEIVDKESSAEAFINRMTNYDLYLPNQKVLPKHSLLYEKFTVYNELTKVKYKTEQGKTAFFDANMKQEIFDGVFKVYRKVTKDKLMDFLEKEFDEFRIVDLTGLDKENKVFNASYGTYHDLCKILDKDFLDNSKNEKILEDIVLTLTLFEDREMIRKRLENYSDLLTKEQVKKLERRHYTGWGRLSAELIHGIRNKESRKTILDYLIDDGNSNRNFMQLINDDALSFKEEIAKAQVIGETDNLNQVVSDIAGSPAIKKGILQSLKIVDELVKIMGHQPENIVVEMARENQFTNQGRRNSQQRLKGLTDSIKEFGSQILKEHPVENSQLQNDRLFLYYLQNGRDMYTGEELDIDYLSQYDIDHIIPQAFIKDNSIDNRVLTSSKENRGKSDDVPSKDVVRKMKSYWSKLLSAKLITQRKFDNLTKAERGGLTDDDKAGFIKRQLVETRQITKHVARILDERFYTETDENNKKIRQVKIVTLKSNLVSNFRKEFELYKVREINDYHHAHDAYLNAVIGKALLGVYPQLEPEFVYGDYPHFHGHKENKATAKKFFYSNIMNFFKKDDVRTDKNGEIIWKKDEHISNIKKVLSYPQVNIVKKVEEQTGGFSKESILPKGNSDKLIPRKTKKFYWDTKKYGGFDSPIVAYSILVIADIEKGKSKKLKTVKALVGVTIMEKMTFERDPVAFLERKGYRNVQEENIIKLPKYSLFKLENGRKRLLASARELQKGNEIVLPNHLGTLLYHAKNIHKVDEPKHLDYVDKHKDEFKELLDVVSNFSKKYTLAEGNLEKIKELYAQNNGEDLKELASSFINLLTFTAIGAPATFKFFDKNIDRKRYTSTTEILNATLIHQSITGLYETRIDLSKLGGD

SEQ ID NO: 715 - protein, 1345 aa, Streptococcus mutans
MKKPYSIGLDIGTNSVGWAVVTDDYKVPAKKMKVLGNTDKSHIKKNLLGALLFDSGNTAEDRRLKRTARRRYTRRRNRILYLQEIFSEEMGKVDDSFFHRLEDSFLVTEDKRGERHPIFGNLEEEVKYHENFPTIYHLRQYLADNPEKVDLRLVYLALAHIIKFRGHFLIEGKFDTRNNDVQRLFQEFLAVYDNTFENSSLQEQNVQVEEILTDKISKSAKKDRVLKLFPNEKSNGRFAEFLKLIVGNQADFKKHFELEEKAPLQFSKDTYEEDLEELLGKIGDDYADLFTLAKNLYDAILLSGILTADDSSTKAPLSASMIQRYNEHQMDLAQLKQFIRQKLSDKYNEVFSDVSKDGYAGYIDGKTNQEAFYKYLKGLLNKIEGSGYFLDKIEREDFLRKQRTFDNGSIPHQIHLQEMRAIIRRQAEFYPFLADNQDRIEKILTFRIPYYVGPLARGKSDFAWLSRKSADKITPWNFDEIVDKESSAEAFINRMTNYDLYLPNQKVLPKHSLLYEKFTVYNELTKVKYKTEQGKTAFFDANMKQEIFDGVFKVYRKVTKDKLMDFLEKEFDEFRIVDLTGLDKENKVFNASYGTYHDLCKILDKDFLDNSKNEKILEDIVLTLTLFEDREMIRKRLENYSDLLTKEQVKKLERRHYTGWGRLSAELIHGIRNKESRKTILDYLIDDGNSNRNFMQLINDDALSFKEEIAKAQVIGETDNLNQVVSDIAGSPAIKKGILQSLKIVDELVKIMGHQPENIVVEMARENQFTNQGRRNSQQRLKGLTDSIKEFGSQILKEHPVENSQLQNDRLFLYYLQNGRDMYTGEELDIDYLSQYDIDHIIPQAFIKDNSIDNRVLTSSKENRGKSDDVPSKDVVRKMKPYWSKLLSAKLITQRKFDNLTKAERGGLTDDDKAGFIKRQLVETRQITKHVARILDERFNTETDENNKKIRQVKIVTLKSNLVSNFRKEFELYKVREINDYHHAHDAYLNAVIGKALLGVYPQLEPEFVYGDYPHFHGHEENKATAKKFFYSNIMNFFKKDDVRTDKNGEIIWKKDEHISNIKKVLSYPQVNIVKKVEEQTGGFSKESILPKGNSDKLIPRKTKKFYWDTKKYGGFDSPIVAYSILVIADIEKGKSKKLKTVKALVGVTIMEKMTFERDPVAFLERKGYRNVQEENIIKLPKYSLFKLENGRKRLLASARELQKGNEIVLPNHLGTLLYHAKNIHKVDEPKHLDYVDKHKDEFKELLDVVSNFSKKYTLAEGNLEKIKELYAQNNGEDLKELASSFINLLTFTAIGAPATFKFFDKNIDRKRYTSTTEILNATLIHQSITGLYETRIDLSKLGGD

SEQ ID NO: 716 - protein, 1345 aa, Streptococcus mutans
MKKPYSIGLDIGTNSVGWAVVTDDYKVPAKKMKVLGNTDKSHIKKNLLGALLFDSGNTAEDRRLKRTARRRYTRRRNRILYLQEIFSEEMGKVDDSFFHRLEDSFLVTEDKRGERHPIFGNLEEEVKYHENFPTIYHLRQYLADNPEKVDLRLVYLALAHIIKFRGHFLIEGKFDTRNNDVQRLFQEFLAVYDNTFENSSLQEQNVQVEEILTDKISKSAKKDRVLKLFPNEKSNGRFAEFLKLIVGNQADFKKHFELEEKAPLQFSKDTYEEELEVLLAQIGDNYAELFLSAKKLYDSILLSGILTVTDVSTKAPLSASMIQRYNEHQMDLAQLKQFIRQKLSDKYNEVFSDVSKDGYAGYIDGKTNQEAFYKYLKGLLNKIEGSGYFLDKIEREDFLRKQRTFDNGSIPHQIHLQEMRAIIRRQAEFYPFLADNQDRIEKILTFRIPYYVGPLARGKSDFAWLSRKSADKITPWNFDEIVDKESSAEAFINRMTNYDLYLPNQKVLPKHSLLYEKFTVYNELTKVKYKTEQGKTAFFDANMKQEIFDGVFKVYRKVTKDKLMDFLEKEFDEFRIVDLTGLDKENKVFNASYGTYHDLCKILDKDFLDNSKNEKILEDIVLTLTLFEDREMIRKRLENYSDLLTKEQVKKLERRHYTGWGRLSAELIHGIRNKESRKTILDYLIDDGNSNRNFMQLINDDALSFKEEIAKAQVIGETDNLNQVVSDIAGSPAIKKGILQSLKIVDELVKIMGHQPENIVVEMARENQFTKQGRRNSQQRLKGLTDSIKEFGSQILKEHPVENSQLQNDRLFLYYLQNGRDMYTGEELDIDYLSQYDIDHIIPQAFIKDNSIDNRVLTSSKENRGKSDDVPSKDVVRKMKSYWSKLLSAKLITQRKFDNLTKAERGGLTDDDKAGFIKRQLVETRQITKHVARILDERFYTETDENNKKIRQVKIVTLKSNLVSNFRKEFELYKVREINDYHHAHDAYLNAVIGKALLGVYPQLEPEFVYGDYPHFHGHKENKATAKKFFYSNIMNFFKKDDVRTDKNGEIIWKKDEHISNIKKVLSYPQVNIVKKVEEQTGGFSKESILPKGNSDKLIPRKTKKFYWDTKKYGGFDSPIVAYSILVIADIEKGKSKKLKTVKALVGVTIMEKMTFERDPVAFLERKGYRNVQEENIIKLPKYSLFKLENGRKRLLASARELQKGNEIVLPNHLGTLLYHAKNIHKVDEPKHLDYVDKHKDEFKELLDVVSNFSKKYTLAEGNLEKIKELYAQNNGEDLKELASSFINLLTFTAIGAPATFKFFDKNIDRKRYTSTTEILNATLIHQSITGLYETRIDLSKLGGD

SEQ ID NO: 717 - protein, 1345 aa, Streptococcus mutans
MKKPYSIGLDIGTNSVGWAVVTDDYKVPAKKMKVLGNTDKSHIKKNLLGALLFDSGNTAEDRRLKRTARRRYTRRRNRILYLQEIFSEEMGKVDDSFFHRLEDSFLVTEDKRGERHPIFGNLEEEVKYHENFPTIYHLRQYLADNPEKVDLRLVYLALAHIIKFRGHFLIEGKFDTRNNDVQRLFQEFLAVYDNTFENSSLQEQNVQVEEILTDKISKSAKKDRVLKLFPNEKSNGRFAEFLKLIVGNQADFKKHFELEEKAPLQFSKDTYEEELEVLLAQIGDNYAELFLSAKKLYDSILLSGILTVTDVSTKAPLSASMIQRYNEHQMDLAQLKQFIRQKLSDKYNEVFSDVSKDGYAGYIDGKTNQEAFYKYLKGLLNKIEGSGYFLDKIEREDFLRKQRTFDNGSIPHQIHLQEMRAIIRRQAEFYPFLADNQDRIEKILTFRIPYYVGPLARGKSDFAWLSRKSADKITPWNFDEIVDKESSAEAFINRMTNYDLYLPNQKVLPKHSLLYEKFTVYNELTKVKYKTEQGKTAFFDANMKQEIFDGVFKVYRKVTKDKLMDFLEKEFDEFRIVDLTGLDKENKVFNASYGTYHDLCKILDKDFLDNSKNEKILEDIVLTLTLFEDREMIRKRLENYSDLLTKEQVKKLERRHYTGWGRLSAELIHGIRNKESRKTILDYLIDDGNSNRNFMQLINDDALSFKEEIAKAQVIGETDNLNQVVSDIAGSPAIKKGILQSLKIVDELVKIMGHQPENIVVEMARENQFTKQGRRNSQQRLKGLTDSIKEFGSQILKEHPVENSQLQNDRLFLYYLQNGRDMYTGEELDIDYLSQYDIDHIIPQAFIKDNSIDNRVLTSSKENRGKSDDVPSKDVVRKMKSYWSKLLSAKLITQRKFDNLTKAERGGLTDDDKAGFIKRQLVETRQITKHVARILDERFYTETDENNKKIRQVKIVTLKSNLVSNFRKEFELYKVREINDYHHAHDAYLNAVIGKALLGVYPQLEPEFVYGDYPHFHGHKENKATAKKFFYSNIMNFFKKDDVRTDRNGEIIWKKDEHISNIKKVLSYPQVNIVKKVEEQTGGFSKESILPKGNSDKLIPRKTKKFYWDTKKYGGFDSPIVAYSILVIADIEKGKSKKLKTVKALVGVTIMEKMTFERDPVAFLERKGYRNVQEENIIKLPKYSLFKLENGRKRLLASARELQKGNEIVLPNHLGTLLYHAKNIHKVDEPKHLDYVDKHKDEFKELLDVVSNFSKKYTLAEGNLEKIKELYAQNNGEDLKELASSFINLLTFTAIGAPATFKFFDKNIDRKRYTSTTEILNATLIHQSITGLYETRIDLSKLGGD

SEQ ID NO: 718 - protein, 1345 aa, Streptococcus mutans
MKKPYSIGLDIGTNSVGWAVVTDDYKVPAKKMKVLGNTDKSHIKKNLLGALLFDSGNTAEDRRLKRTARRRYTRRRNRILYLQEIFSEEMGKVDDSFFHRLEDSFLVTEDKRGERHPIFGNLEEEVKYHENFPTIYHLRQYLADNPEKVDLRLVYLALAHIIKFRGHFLIEGKFDTRNNDVQRLFQEFLAVYDNTFENSSLQEQNVQVEEILTDKISKSAKKDRVLKLFPNEKSNGRFAEFLKLIVGNQADFKKHFELEEKAPLQFSKDTYEEELEVLLAQIGDNYAELFLSAKKLYDSILLSGILTVTDVSTKAPLSASMIQRYNEHQMDLAQLKQFIRQKLSDKYNEVFSDVSKDGYAGYIDGKTNQEAFYKYLKGLLNKIEGSGYFLDKIEREDFLRKQRTFDNGSIPHQIHLQEMRAIIRRQAEFYPFLADNQDRIEKILTFRIPYYVGPLARGKSDFAWLSRKSADKITPWNFDEIVDKESSAEAFINRMTNYDLYLPNQKVLPKHSLLYEKFTVYNELTKVKYKTEQGKTAFFDANMKQEIFDGVFKVYRKVTKDKLMDFLEKEFDEFRIVDLTGLDKENKVFNASYGTYHDLCKILDKDFLDNSKNEKILEDIVLTLTLFEDREMIRKRLENYSDLLTKEQVKKLERRHYTGWGRLSAELIHGIRNKESRKTILDYLIDDGNSNRNFMQLINDDALSFKEEIAKAQVIGETDNLNQVVSDIAGSPAIKKGILQSLKIVDELVKIMGHQPENIVVEMARENQFTNQGRQNSQQRLKGLTDSIKEFGSQILKEHPVENSQLQNDRLFLYYLQNGRDMYTGEELDIDYLSQYDIDHIIPQAFIKDNSIDNRVLTSSKENRGKSDDVPSEDVVRKMKSYWSKLLSAKLITQRKFDNLTKAERGGLTDDDKAGFIKRQLVETRQITKHVARILDERFYTETDENNKKIRQVKIVTLKSNLVSNFRKEFELYKVREINDYHHAHDAYLNAVIGKALLGVYPQLEPEFVYGDYPHFHGHKENKATAKKFFYSNIMNFFKKDDVRTDKNGEIIWKKDEHISNIKKVLSYPQVNIVKKVEEQTGGFSKESILPKGNSDKLIPRKTKKFYWDTKKYGGFDSPIVAYSILVIADIEKGKSKKLKTVKALVGVTIMEKMTFERDPVAFLERKGYRNVQEENIIKLPKYSLFKLENGRKRLLASARELQKGNEIVLPNHLGTLLYHAKNIHKVDEPKHLDYVDKHKDEFKELLDVVSNFSKKYTLAEGNLEKIKELYAQNNGEDLKELASSFINLLTFTAIGAPATFKFFDKNIDRKRYTSTTEILNATLIHQSITGLYETRIDLSKLGGD

SEQ ID NO: 719 - protein, 1345 aa, Streptococcus mutans; identical to SEQ ID NO: 718

SEQ ID NO: 720 - protein, 1345 aa, Streptococcus mutans; identical to SEQ ID NO: 714

SEQ ID NO: 721 - protein, 1345 aa, Streptococcus mutans; identical to SEQ ID NO: 715

SEQ ID NO: 722 - protein, 1345 aa, Streptococcus mutans; identical to SEQ ID NO: 716

SEQ ID NO: 723 - protein, 1345 aa, Streptococcus mutans; identical to SEQ ID NO: 717

SEQ ID NO: 724 - protein, 1345 aa, Streptococcus mutans; identical to SEQ ID NO: 716

SEQ ID NO: 725 - protein, 1345 aa, Streptococcus mutans; identical to SEQ ID NO: 716

SEQ ID NO: 726 - protein, 1345 aa, Streptococcus mutans; identical to SEQ ID NO: 716

SEQ ID NO: 727 - protein, 1345 aa, Streptococcus mutans; identical to SEQ ID NO: 717

SEQ ID NO: 728 - protein, 1345 aa, Streptococcus mutans
MKKPYSIGLDIGTNSVGWAVVTDDYKVPAKKMKVLGNTDKSHIKKNLLGALLFDSGNTAEDRRLKRTARRRYTRRRNRILYLQEIFSEEMGKVNDSFFHRLEDSFLVTEDKRGERHPIFGNLEEEVKYHENFPTIYHLRQYLADNPEKVDLRLVYLALAHIIKFRGHFLIEGKFDTRNNDVQRLFQEFLAVYDNTFENSSLQEQNVQVEEILTDKISKSAKKDRVLKLFPNEKSNGRFAEFLKLIVGNQADFKKHFELEEKAPLQFSKDTYEEELEVLLAQIGDNYAELFLSAKKLYDSILLSGILTVTDVSTKAPLSASMIQRYNEHQMDLAQLKQFIRQKLSDKYNEVFSDVSKDGYAGYIDGKTNQEAFYKYLKGLLNKIEGSGYFLDKIEREDFLRKQRTFDNGSIPHQIHLQEMRAIIRRQAEFYPFLADNQDRIEKILTFRIPYYVGPLARGKSDFAWLSRKSADKITPWNFDEIVDKESSAEAFINRMTNYDLYLPNQKVLPKHSLLYEKFTVYNELTKVKYKTEQGKTAFFDANMKQEIFDGVFKVYRKVTKDKLMDFLEKEFDEFRIVDLTGLDKENKVFNASYGTYHDLCKILDKDFLDNSKNEKILEDIVLTLTLFEDREMIRKRLENYSDLLTKEQVKKLERRHYTGWGRLSAELIHGIRNKESRKTILDYLIDDGNSNRNFMQLINDDALSFKEEIAKAQVIGETDNLNQVVSDIAGSPAIKKGILQSLKIVDELVKIMGHQPENIVVEMARENQFTKQGRRNSQQRLKGLTDSIKEFGSQILKEHPVENSQLQNDRLFLYYLQNGRDMYTGEELDIDYLSQYDIDHIIPQAFIKDNSIDNRVLTSSKENRGKSDDVPSKDVVRKMKSYWSKLLSAKLITQRKFDNLTKAERGGLTDDDKAGFIKRQLVETRQITKHVARILDERFYTETDENNKKIRQVKIVTLKSNLVSNFRKEFELYKVREINDYHHAHDAYLNAVIGKALLGVYPQLEPEFVYGDYPHFHGHKENKATAKKFFYSNIMNFFKKDDVRTDKNGEIIWKKDEYISNIKKVLSYPQVNIVKKVEEQTGGFSKESILPKGNSDKLIPRKTKKFYWDTKKYGGFDSPIVAYSILVIADIEKGKSKKLKTVKALVGVTIMEKMTFERDPIAFLERKGYRNVQEENIIKLPKYSLFKLENGRKRLLASARELQKGNEIVLPNHLGTLLYHAKNIHKVDEPKHLDYVDKHKDEFKELLDVVSNFSKKYTLAEGNLEKIKELYAQNNGEDLKELASSFINLLTFTAIGAPAAFKFFDKNIDRKRYTSTTEILNATLIHQSITGLYETRIDLSKLGGD

SEQ ID NO: 729 - protein, 1345 aa, Streptococcus mutans; identical to SEQ ID NO: 728

SEQ ID NO: 730 - protein, 1345 aa, Streptococcus mutans
MKKPYSIGLDIGTNSVGWAVVTDDYKVPAKKMKVLGNTDKSHIKKNLLGALLFDSGNTAEDRRLKRTTRRRYTRRRNRILYLQEIFSEEMGKVDDSFFHRLEDSFLVTEDKRGERHPIFGNLEEEVKYHENFPTIYHLRQYLADNPEKTDLRLVYLALAHIIKFRGHFLIEGKFDTRNNDVQRLFQEFLAVYDNTFENSSLQEQNVQVEEILTDKISKSAKKDRVLKLFPNEKSNGCFAEFLKLIVGNQADFKKHFELEEKAPLQFSKDTYEEELEVLLAQIGDNYAELFLSAKKLYDSILLSGILTVTDVSTKAPLSASMIQRYNEHQMDLTQLKQFIRQKLSDKYNEVFSDVSKDGYAGYIDGKTNQEAFYKYLKGLLNKIEGSGYFLDKIEREDFLRKQRTFDNGSIPHQIHLQEMRAIIRRQAEFYPFLADNQDRIEKLLTFRIPYYVGPLASGKSDFAWLSRKSADKITPWNFDEIVDKESSAEAFINRMTNYDLYLPNQKVLPKHSLLYEKFTVYNELTKVKYKTEQGKTAFFDANMKQEIFDGVFKVYRKVTKDKLMDFLEKEFDEFRIVDLTGLDKENKVFNASYGTYHDLCKILDKDFLDNSKNEKILEDIVLTLTLFEDREMIRKRLENYSDLLTKEQVKKLERRHYTGWGRLSAELIHGIRNKESRKTILDYLIDDGNSNRNFMQLINDDALSFKEEIAKAQVIGETDNLNQVVSDIAGSPAIKKGILQSLKIVDELVKIMGHQPENIVVEMARENQFTNQGRRNSQQRLKGLTDSIKEFGSQILKEHPVENSQLQNDRLFLYYLQNGRDMYTGEELDIDYLSQYDIDHIIPQAFIKDNSIDNRVLTSSKENRGKSDDVPSKDVVRKMKSYWSKLLSAKLITQRKFDNLTKAERGGLTDDDKAGFIKRQLVETRQITKHVARILDERFNTETDENNKKIRQVKIVTLKSNLVSNFRKEFELYKVREINDYHHAHDAYLNAVIGKALLGVYPQLEPEFVYGDYPHFHGHKENKATAKKFFYSNIMNFFKKDDVRTDKNGEIIWKKDEHISNIKKVLSYPQVNIVKKVEEQTGGFSKESILPKGNSDKLIPRKTKKFYWDTKKYGGFDSPIVAYSILVIADIEKGKSKKLKTVKALVGVTIMEKMTFERDPVAFLERKGYRNVQEENIIKLPKYSLFKLENGRKRLLASARELQKGNEIVLPNHLGTLLYHAKNIHKVDEPKHLDYVDKHKDEFKELLDVVSNFSKKYTLAEGNLEKIKELYAQNNGEDLKELASSFINLLTFTAIGAPATFKFFDKNIDRKRYTSTTEILNATLIHQSITGLYETRIDLSKLGGD

SEQ ID NO: 731 - protein, 1345 aa, Streptococcus mutans; identical to SEQ ID NO: 730

SEQ ID NO: 732 - protein, 1350 aa, Streptococcus mutans
MKKPYSIGLDIGTNSVGWAVVTDDYKVPAKKMTVLGNTDKSHIKKNLLGALLFDSGNTAADRRLKRTARRRYTRRRNRILYLQEIFAEEMSKVDDSFFHRLEDSFLVTEDKRGERHPIFGNLEEEVKYHENFPTIYHLRQYLADNPEKVDLRLVYLALAHIIKFRGHFLIEGKFDTRNNDVQRLFQEFLAVYDNTFENSSLQEQNVQVEEILTDKISKSAKKDRVLKLFPNEKSNGRFAEFLKLIVGNQADFKKHFELEEKTPLQFSKDTYEEELEVLLAQIGDNYAELFLSAKKLYDSILLSGILTVTDVSTKAPLSASMIQRYNEHQMDLAQLKQFIRQKLSDKYNEVFSDVSKDGYAGYIDGKTNQEAFYKYLKGLLNKIEGSGYFLDKIEREDFLRKQRTFDNGSIPHQIHLQEMRAIIRRQAEFYPFLADNQDRIEKILTFRIPYYVGPLARGKSDFAWLSRKSADKITPWNFDEIVDKESSAEAFINRMTNYDLYLPNQKVLPKHSLLYEKFTVYNELTKVKYKTEQGKTAFFDANMKQEIFDGVFKVYRKVTKDKLMDFLEKEFDEFRIVDLTGLDKENKAFNASYGTYHDLRKILDKDFLDNSKNEKILEDIVLTLTLFEDREMIRKRLENYSDLLTKEQVKKLERRHYTGWGRLSAELIHGIRNKESRKTILDYLIDDGNSNRNFMQLINDDALSFKEEIAKAQVIGETDNLNQVVSDIAGSPAIKKGILQSLKIVDELVKIMGHQPENIVVEMARENQFTNQGRRNSQQRLKGLTDSIKEFGSQILKEHPVENSQLQNDRLFLYYLQNGRDMYTGEELDIDYLSQYDIDHIIPQAFIKDNSIDNRVLTSSKENRGKSDDVPSEDVVNRMRPFWNKLLSSGLISQRKYNNLTKKELTPDDKAGFIKRQLVETRQITKHVARMLDERFNKEFDDNNKRIRRVKIVTLKSNLVSSFRKEFELYKVREINDYHHAHDAYLNAVVVKALLVKYPKLEPEFVYGEYPKYNSYRERKTATQKMFFYSNIMNMFKSKVKLADDQIVERPMIEVNDETGEIAWDKTKHITTVKKVLSYPQVNIVKKVEEQTIGQNGGLFDDNPKSPLEVIPSKLVPLKKALNPEKYGGYQKPTTAYPILLIVDTKQLIPISVMDKKRFEQNPVKFLKDKGYQQIEKNNFVKLPKYTLVDIGNGIKRLWASSKEVHKGNQLVVSKKSQDLLYHAHHLDNDYSNEYVKNHYQQFDILFNEITSFSKKCKLGKEHIQKIEEAYSKERDSASIEELADGFIKLLGFTQLGATSPFSFLGIKLNQKQYTGKKDYLLPCMEATLIHQSITGLYETRIDLSKLGGD

SEQ ID NO: 733 - protein, 1350 aa, Streptococcus mutans; identical to SEQ ID NO: 732

SEQ ID NO: 734 - protein, 1345 aa, Streptococcus mutans
MKKPYSIGLDIGTNSVGWAVVTDDYKVPDKKMKVLGNTDKSHIKKNLLGALLFDSGNTAEDRRLKRTARRRYTRRRNRILYLQEIFSEEMGKVDDSFFHRLEDSFLVTEDKRGERHPIFGNLEEEVKYHENFPTIYHLRQYLADNPEKTDLRLVYLALAHIIKFRGHFLIEGKFDTRNNDVQRLFQEFLAVYDNTFENSSLQEQNVQVEEILTDKISKSAKKDRVLKLFPNEKSNGRFAEFLKLIVGNQADFKKHFELEEKAPLQFSKDIYEEELEVLLAQIGDNYAELFLSAKKLYDSILLSGILTVTDVSTKAPLSASMIQRYNEHQMDLAQLKQFIRQKLSDKYNEVFSDVSKDGYAGYIDGKTNQEAFYKYLKGLLNKIEGSGYFLDKIEREDFLRKQRTFDNGSIPHQIHLQEMRAIIRRQAEFYPFLADNQDRIEKILTFRIPYYVGPLARGKSDFAWLSRKSADKITPWNFDEIVDKESSVEAFINRMTNYDLYLPNQKVLPKHSLLYEKFTVYNELTKVKYKTEQGKTAFFDANMKQEIFDGVFKVYRKVTKDKLMDFLEKEFDEFRIVDLTGLDKENKAFNASYGTYHDLRKILDKDFLDNSKNEKILEDIVLTLTLFEDREMIRKRLKNYSDLLTKEQLKKLERRHYTGWGRLSAELIHGIRNKESRKTILDYLIDDGNSNRNFMQLINDDALSFKEEIAKAQVIGETDNLNQVVSDIAGSPAIKKGILQSLKIVDELVKIMGHQPENIVVEMARENQFTNQGRRNSQQRLKGLTDSIKEFGSQILKEHPVENSQLQNDRLFLYYLQNGRDMYTGEELDIDYLSQYDIDHIIPQAFIKDNSIDNRVLTSSKENRGKSDDVPSKDVVRKMKSYWSKLLSAKLITQRKFDNLTKAERGGLTDDDKAGFIKRQLVETRQITKHVARILDERFYTETDENNKKIRQVKIVTLKSNLVSNFRKEFELYKVREINDYHHAHDAYLNAVIGKALLGVYPQLEPEFVYGDYPHFHGHKENKATAKKFFYSNIMNFFKKDDVRTDKNGEIIWKKDEHISNIKKVLSYPQVNIVKKVEEQTGGFSKESILPKGNSDKLIPRKTKKFYWDTKKYGGFDSPIVAYSILVIADIEKGKSKKLKTVKALVGVTIMEKMTFERDPVAFLERKGYRNVQEENIIKLPKYSLFKLENGRKRLLASARELQKGNEIVLPNHLGTLLYHAKNIHKVDEPKHLDYVDKHKDEFKELLDVVSNFSKKYTLAEGNLEKIKELYAQNNGEDLKELASSFINLLTFTAIGAPATFKFFDKNIDRKRYTSTTEILNATLIHQSITGLYETRIDLSKLGGD

SEQ ID NO: 735 - protein, 1345 aa, Streptococcus mutans
MKKPYSIGLDIGTNSVGWAVVTDDYKVSAKKMKVLGNTDKSHIKKNLLGALLFDSGNTAEDRRLKRTARRRYTRRRNRILYLQEIFAEEMSKVDDSFFHRLEDSFLVTEDKRGERHPIFGNLEEEVKYHENFPTIYHLRQYLADNPEKVDLRLVYLALAHIIKFRGHFLIEGKFDTRNNDVQRLFQEFLAVYDNTFENSSLQEQNVQVEEILTDKISKSAKKDRVLKLFPNEKSNGRFAEFLKLIVGNQADFKKHFELEEKAPLQFSKDTYEEELEVLLAQIGDNYAELFLSAKKLYDSILLSGILTVTDVSTKAPLSASMIQRYNEHQMDLAQLKQFIRQKLSDKYNEVFSDVSKDGYAGYIDGKTNQEAFYKYLKGLLNKIEGSGYFLDKIEREDFLRKQRTFDNGSIPHQIHLQEMRAIIRRQAEFYPFLADNQDRIEKILTFRIPYYVGPLARGKSDFAWLSRKSADKITPWNFDEIVDKESSAEAFINRMTNYDLYLPNQKVLPKHSLLYEKFTVYNELTKVKYKTEQGKTAFFDANMKQEIFDGVFKVYRKVTKDKLMDFLEKEFDEFRIVDLTGLDKENKAFNASYGTYHDLRKILDKDFLDNSKNEKILEDIVLTLTLFEDREMIRKRLENYSDLLTKEQVKKLERRHYTGWGRLSAELIHGIRNKESRKTILDYLIDDGNSNRNFMQLINDDALSFKEEIAKAQVIGETDNLNQVVSDIAGSPAIKKGILQSLKIVDELVKIMGHQPENIVVEMARENQFTNQGRRNSQQRLKGLTDSIKEFGSQILKEHPVEHSQLQNDRLFLYYLQNGRDMYTGEELDIDYLSQYDIDHIIPQAFIKDNSIDNRVLTSSKENRGKSDDVPSKNVVRKMKSYWSKLLSAKLITQRKFDNLTKAERGGLTDDDKAGFIKRQLVETRQITKHVARILDERFHTETDENNKKIRQVKIVTLKSNLVSNFRKEFELYKVREINDYHHTHDAYLNAVIGKALLGVYPQLEPEFVYGDYPHFHGHKENKATAKKFFYSNIMNFFKKDDVRTDKNGEIIWKKDEHISNIKKVLSYPQVNIVKKVEEQTGGFSKESILPKGNSDKLIPRKTKKFYWDTKKYGGFDSPIVAYSILVIADIEKGKSKKLKTVKALVGVTIMEKMTFERDPVAFLERKGYRNVQEENIIKLPKYSLFKLENGRKRLLASARELQKGNEIVLPNHLGTLLYHAKNIHKVDEPKHLDYVDKHKDEFKELLDVVSNFSKKYTLAEGNLEKIKELYAQNNGEDLKELASSFINLLTFTAIGAPATFKFFDKNIDRKRYTSTTEILNATLIHQSITGLYETRIDLSKLGGD

SEQ ID NO: 736 - protein, 1345 aa, Streptococcus mutans; identical to SEQ ID NO: 735

SEQ ID NO: 737 - protein, 1345 aa, Streptococcus mutans
MKKPYSIGLDIGTNSVGWSVVTDDYKVPAKKMKVLGNTDKSHIEKNLLGALLFDSGNTAEDRRLKRTARRRYTRRRNRILYLQEIFSEEMGKVDDSFFHRLEDSFLVTEDKRGERHPIFGNLEEEVKYHENFPTIYHLRQYLADNPEKVDLRLVYLALAHIIKFRGHFLIEGKFDTRNNDVQRLFQEFLAVYDNTFENSSLQEQNVQVEEILTDKISKSAKKDRVLKLFPNEKSNGRFAEFLKLIVGNQADFKKHFELEEKAPLQFSKDTYEEELEVLLAQIGDNYAELFLSAKKLYDSILLSGILTVTDVGTKAPLSASMIQRYNEHQMDLAQLKQFIRQKLSDKYNEVFSDVSKDGYAGYIDGKTNQEAFYKYLKGLLNKIEGSGYFLDKIEREDFLRKQRTFDNGSIPHQIHLQEMRAIIRRQAEFYPFLADNQDRIEKLLTFRIPYYVGPLARGKSDFAWLSRKSADKITPWNFDEIVDKESSAEAFINRMTNYDLYLPNQKVLPKHSLLYEKFTVYNELTKVKYKTEQGKTAFFDANMKQEIFDGVFKVYRKVTKDKLMDFLEKEFDEFRIVDLTGLDKENKVFNASYGTYHDLCKILDKDFLDNSKNEKILEDIVLTLTLFEDREMIRKRLENYSDLLTKEQVKKLERRHYTGWGRLSAELIHGIRNKESRKTILDYLIDDGNSNRNFMQLINDDALSFKEEIAKAQVIGETDNLNQVVSDIAGSPAIKKGILQSLKIVDELVKIMGHQPENIVVEMARENQFTNQGRRNSQQRLKGLTDSIKEFGSQILKEHPVENSQLQNDRLFLYYLQNGRDMYTGEELDIDYLSQYDIDHIIPQAFIKDNSIDNRVLTSSKENRGKSDDVPSKDVVRKMKSYWSKLLSAKLITQRKFDNLTKAERGGLTDDDKAGFIKRQLVETRQITKHVARILDERFNTETDENNKKIRQVKIVTLKSNLVSNFRKEFELYKVREINDYHHAHDAYLNAVIGKALLGVYPQLEPEFVYGDYPHFHGHKENKATAKKFFYSNIMNFFKKDDVRIDKNGEIIWKKDEHISNIKKVLSYPQVNIVKKVEEQTGGFSKESILPKGNSDKLIPRKTKKFYWDTKKYGGFDSPIVAYSILVIADIEKGKSKKLKTVKALVGVTIMEKMTFERDPVAFLERKGYRNVQEENIIKLPKYSLFKLENGRKRLLASARELQKGNEIVLPNHLGTLLYHAKNIHKVDEPKHLDYVDKHKDEFKELLDVVSNFSKKYTLAEGNLEKIKELYAQNNGEDLKELASSFINLLTFTAIGAPATFKFFDKNIDRKRYTSTTEILNATLIHQSITGLYETRIDLSKLGGD

SEQ ID NO: 738 - protein, 1345 aa, Streptococcus mutans; identical to SEQ ID NO: 737

SEQ ID NO: 739 - protein, 1355 aa, Streptococcus mutans
MKKSYSIGLDIGTNSVGWAVVTDDYKVPAKKMKVLGNTDKSHIKKNLLGALLFDSGNTAEDRRLKRTARRRYTRRRNRILYLQEIFSEEMGKVDDSFFHRLDESFLTDDDKNFDSHPIFGNKAEEDAYHQKFPTIYHLRKHLADSTEKADLRLVYLALAHMIKFRGHFLIEGELNAENTDVQKLFADFVGVYDRTFDDSHLSEITVDASSILTEKISKSRRLEKLINNYPKEKKNTLFGNLIALSLGLQPNFKTNFKLSEDAKLQFSKDTYEEDLEELLGKIGDDYADLFTLAKNLYDAILLSGILTADDSSTKAPLSASMIKRYAEHHEDLEKLKEFIKANKPELYHDIFKDETKNGYAGYIENGVKQDEFYKYLKNTLSKIAGSDYFLDKIEREDFLRKQRTFDNGSIPHQIHLQEMHAILRRQGDYYPFLKENQDRIEKILTFRIPYYVGPLARKNSRFAWAEYHSDEAVMPWNFDQVIDKESSAQAFIEHMTNNDLYLPNEKVLPKHSPLYEKYTVYNELTKIKYVTEIGEAKFFDANLKQEIFDGLFKHERKVTKKKLRTFLDKNFDEFRIVDIQGLDKETETFNASYATYQDLLKVIKDKVFMDNPENAEILENIVLTLTLFEDREMIKQRLAKYADVFDKKVIDQLARRHYTGWGRLSAKLLNGIRDKQSCKTIMDYLIDDAQSNRNLMQLITDDNLTFKDDIVKAQYVDNSDDLHQVVQSLAGSPAIKKGILQSLKIVDELVKVMGKEPEQIVVEMARENQTTAKGRRNSQQRYKRLKEAIKSLDRDLNHKILKEHPTDNQALQNNRLFLYYLQNGRDMYTGESLDINRLSDYDIDHVIPQAFIKDNSIDNRVLTSSKANRGKSDDVPSEDVVNRMRPFWNKLLSSGLISQRKYNNLTKKELTPDDKAGFIKRQLVETRQITKHVARMLDERFNKEFDDNNKRIRRVKIVTLKSNLVSSFRKEFELYKVREINDYHHAHDAYLNAVVVKALLVKYPKLEPEFVYGEYPKYNSYRERKTATQKMFFYSNIMNMFKSKVKLADDQIVERPMIEVNDETGEIAWDKTKHITTVKKVLSYPQVNIVKKVEEQTIGQNGGLFDDNPKSPLEVIPSKLVPLKKALNPEKYGGYQKPTTAYPILLIVDTKQLIPISVMDKKRFEQNPVKFLKDKGYQQIEKNNFVKLPKYTLVDIGNGIKRLWASSKEVHKGNQLVVSKKSQDLLYHAHHLDNDYSNEYVKNHYQQFDILFNEITSFSKKCKLGKEHIQKIEEAYSKERDSASIEELADGFIKLLGFTQLGATSPFSFLGIKLNQKQYTGKKDYLLPCMEATLIHQSITGLYETRIDLNKLGGD

SEQ ID NO: 740 - protein, 1355 aa, Streptococcus mutans; identical to SEQ ID NO: 739

SEQ ID NO: 741 - protein, 1125 aa, Streptococcus mutans
MTNGKILGLDIGIASVGVGIINAKTGNVEHASSRIFPAANADNNVERRSARGGRRLIRRKKHRLKRVEDLFEKYNIDTDFSNLNLNPYQLRVKGLNEQLSNEELFAILKNIAKRRGISYLDDAEDDSVGSSDYAKAIDENRKLLKKQTPGEIQLKRLEKYGQLRGNFTIQDENGEYHRLINVFSTSDYVKEARRILETQSYYNKFITESFVEDYIKILQGKRKYYVGPGNEKSRTDYGIYRTDGETLDNLFGILIGKCGFYPEEYRAAKASYTAQEYNFLNDLNNLTVPTETKKLSTEQKYQLVDFAKTASTLEAAKLLKEIAKLVGCQVEEIKGYRLDNKDKPDLHTFEPFRKLKSNLTTIAVENLSITTLDTLAHILTLNTEREGIEEAIQKELPNIFSDEQITGIIAVRKKNSQIFGKGWHSFSIKLMKELIPELYETSEEQMTILIRLKKVKTNSKITNRTKYINEQEVTDEIYNPVVSKSIRQTVKIINAAIKKYGAFDQIVIEMPRESNEEDERKFIADLQKSNAKEKDDAMKQAALLYNGKAELPHGVFHGHKELATKIRLWYQQGERCLYSGKHIDIHDLIHNQHMFEIDHVLPLSLSFDDSLANKVLVYSWANQEKGQRTPFQALPQMASAWSFRELRDYISKQKGISKKKRDYLLTEQDINKVEVKQKFIERNLVDTRYVSRVVLNTLQDALKVMNKETKISVIRGQFTSQLRRQWRIDKSRETYHHHAVDALIIAASSQLRLWKKQNNPMFAEDKHGQKINLDTGEVLSDDAYKELVYQAPYQGFVNTISSKSFEDEILFSYQVDSKVNRKISDATIYATRQAQLGKDKKEETYVLGKIKDIYSQAGYDAFRKKYDKDKAVFLMYQKDPETWEKVIEVILRDYKELDDKGKEIGNPFERYKVKHGFVRKYSRKNKGTEIKSLKYYDNKLGNHIDITPNNSKHSVVLQSINPWRADLYFNPETTKYELMGLKYADLSFEKGTGKYSISREKYDEIKEREGISSKSEFKFTLYKNDLILVKDIGNHKELIARFNSKNDTSKHYVELKPWNKAKFDSEEELIPAFGKVAKSGQFIKGLNKPDLSIYKVKTDILGHKYYIKKEGDKPKLNFENKIKNK

SEQ ID NO: 742 - protein, 1125 aa, Streptococcus mutans
MTNGKILGLDIGIASVGVGIINAKTGNVEHASSRIFPAANADNNVERRSARGGRRLIRRKKHRLKRVEDLFEKYNIDTDFSNLNLNPYQLRVKGLNEQLSNEELFAILKNIAKRRGISYLDDAEDDSVGSSDYAKAIDENRKLLKKQTPGEIQLKRLEKYGQLRGNFTIQDENGEYHRLINVFSTSDYVKEARRILETQSYYNKFITESFVEDYIKILQGKRKYYVGPGNEKSRTDYGIYRTDGETLDNLFGILIGKCGFYPEEYRAAKASYTAQEYNFLNDLNNLTVPTETKKLSTEQKYQLVDFAKTASTLGAAKLLKEIAKLVGCQVEEIKGYRLDNKDKPDLHTFEPFRKLKSNLTTIAVENLSITTLDTLAHILTLNTEREGIEEAIQKELPNIFSDEQITEIIAVRKKNSQIFGKGWHSFSIKLMKELIPELYETSEEQMTILTRLKKVKTNSKITNRTKYINEEEITDEIYNPVVSKSIRQTVKIINATIKKYGAFDQIIIEMPRESNEEDERKFIADLQKSNAKEKDDAMKQAALLYNGKDELPHDVFHGHKELATKIRLWYQQGERCLYSGKHIDIHDLIHNQHMFEIDHVLPLSLSFDDSLANKVLVYSWANQEKGQRTPFQALPQMASAWSFRELRDYISKQKGISKKKRDYLLTEQDINKVEVKQKFIERNLVDTRYVSRVVLNTLQDALKVMNKETKISVIRGQFTSQLRRQWRIDKSRETYHHHAVDALIIAASSQLRLWKKQNNPMFAEDKHGQKINLDTGEVLSDDAYKELVYQAPYQGFVNTISSKSFEDEILFSYQVDSKVNRKISDATIYATRQAQLGKDKKEETYVLGKIKDIYSQAGYDAFRKKYDKDKAVFLMYQKDPETWEKVIEVILRDYKELDDKGKEIGNPFERYKVKHGFVRKYSRKNKGTEIKSLKYYDNKLGNHIDITPNNSKHSVVLQSINPWRADLYFNPETTKYELMGLKYADLSFEKGTGKYSISREKYDEIKEREGISSKSEFKFTLYKNDLILVKDIGNHKELIARFNSKNDTSKHYVELKPWNKAKFDSEEELIPAFGKVAKSGQFIKGLNKPDLSIYKVKTDILGHKYYIKKEGDKPKLNFENKIKNK

SEQ ID NO: 743 - protein, 1125 aa, Streptococcus mutans; identical to SEQ ID NO: 742

SEQ ID NO: 744 - protein, 1125 aa, Streptococcus mutans; identical to SEQ ID NO: 741

SEQ ID NO: 745 - protein, 670 aa, Streptococcus oralis
MAKFNKNYSIGLDIGVSSVGYAVVTEDYRVPAFKFKVLGNTEKEKIKKNLIGSTTFVPAQSAQGTRVFRVNRRRIDRRNHRIAYLRDIFQKEIGKIDKNFYRRLDESFRVLGDKSEDIQIKQPFFGNKELETAYHKKYPTIYHLRKHLADADKNSPVADIREVYMALSHIFKYRGHFLTLGKIDPNNINMQNSWIDFIESCQDAFDLEISDESKTIAAIFKSSDNRQEKVKGILSYFQPELAKKDKSIFKQLLQLLFGLKTKFKECFELEEEPDLNFSKENYDENLENLLGTLEEDFPDVFAKLKILRDTILLSDMLTYTGATHARFSATMVERYEEHRKDLQRFKSFVKQNLSEQDYLDIFGRKTPNGFDVDKETKGYVGYISNKMVLTNKQKTIQQNFYDYISGKITGIEGAEYFLNKISDGTFLRKLRTTDNGTIPNQIHAYELEKIIERQGRDYPFLLENKDKLLSILTFKIPYYVGPLAKGNNSRFAWIKRTTSQDVLDNNDEDTKNGKIRPWNYHKLINMDETRDAFITNLIGNDIILLNEKVLPKRSLIYEEVMLQNELTRIKYKDKYGKIHFFDSELRQEIINNLFKTNSKRVSSAMLLAYLENFTNLQAVEIVSGIEKGKSLNSTLKTYNDLKTIFSEDLLDSEIYQKELEEIIKVITVFV

SEQ ID NO: 746 - protein, 1373 aa, Streptococcus oralis
MENKNYSIGLDIGTNSVGWAVITDDYKVPSKKMKVLGNTDKRFIKKNLIGALLFDEGTTAEARRLKRTARRRYTRRKNRLRYLQEIFAEEMSKVDSSFFHRLDDSFLIPEDKKGSKYPIFATLIEEKEYHKQFPTIYHLRKQLADSKEKTDLRLIYLALAHMIKYRGHFLYEDTFDIKNNDIQKIFNEFISIYNNTFEGNSLSGQNVQVEAIFTDKISKSAKRERVLKLFPDEKSTGLFSEFLKLIVGNQADFKKHFDLEEKAPLQFSRDTYDEDLENLLGQIGDDFADLFVAAKKLYDAILLSGILTVTDPSTKAPLSASMIERYENHQKDLATLKQFIKTNLPEKYDEVFSDQSKDGYAGYIDGKTTQESFYKYIKNLLSKFEGADYFLEKIEREDFLRKQRTFDNGSIPHQIHLQEMNAILRRQGEHYPFLKENKEKIEKILTFRIPYYVGPLARGNRDFAWLTRNSDQAIRPWNFEEIVDKASSAESFINKMTNYDLYLPEEKVLPKHSLLYETFAVYNELTKVKFIAEGLRDYQFLDSRQKKDIFYTLFKAEDKRKVTEKDIIQYLHTVDGYDGIELKGIEKQFNASLSTYHDLLKIIKDKEFMDDPNNEEILENIVHTLTIFEDREMIKQRLAQYDSLFDEKVIKALTRRHYTGWGKLSSKLINGIRDKQTGKTILDYLMDDGYNNRNFMQLINDDELSFKEIIKKAQVVGKTDDVKQVVQELPGSPAIKKGILQSIKLVDELVKVMGHEPESIVIEMARENQTTARGKKNSQQRYKRIEDSLKILASGLNAKILKEHPTDNIQLQNDRLFLYYLQNGRDMYTGKPLDINQLSSYDIDHIVPQAFIKDDSLDNRVLTSLKDNRGKSDNVPSLEVVEKMKTFWQQLLDSKLISYRKFNNLTKAERGGLDERDKVGFIKRQLVETRQITKHVAQILDARYNTEVNEKDKKNRTVKIITLKSNLVSNFRKEFRLYKIREINDYHHAHDAYLNAVVAKAILKKYPKLEPEFVYGDYQKYDLKRYISRSKDPKEIEKATEKYFFYSNLLNFFKEEVHYADGTIVKRENIEYSKDTGEIAWNKEKDFATIKKVLSLPQVNIVKKREVQTGGFSKESILPKGNSDKLIPRKTKDILWDTTKYGGFDSPVIAYSILLIADIEKGKAKRLKTVKTLVGITIMEKATFEKSPIAFLENKGYHNVRKENILCLPKYSLFELKNGRRRMLASAKELQKGNEIVLPVHLTTLLYHAKNIHRLDEPEHLEYIQKHRNEFKGLLNLVSEFSQKYVLADANLEKIKNLYADNEQADIEILANSFINLLTFTALGAPAAFKFFGKDVDRKRYTTVSEILNATLIHQSITGLYETRIDLSKLGED

SEQ ID NO: 747 - protein, 1371 aa, Streptococcus oralis
MENKNYSIGLDIGTNSVGWSVITDDYKVPSKKMKVLGNTDKRFIKKNLIGALLFDEGTTAEARRLKRTARRRYTRRKNRLRYLQEIFAEEMSKVDSSFFHRLDDSFLIPEDKRGSKYPIFATLAEEKEYHKQFPTIYHLRKQLADSKEKTDLRLIYLALAHMIKYRGHFLYEDTFDIKNNDIQKIFSEFISIYDNTFEGSSLSGQNAQVEAIFTDKISKSAKRERVLKLFPDEKSTGLFSEFLKLIVGNQADFKKHFDLGEKAPLQFSKDTYDEDLENLLGQIGDDFADLFLVAKKLYDAILLSGILTVTDPSTKAPLSASMIERYENHQKDLAVLKQFIKNNLPEKYDEVFSDQSKDGYAGYIDGKTTQEAFYKYIKNLLSKFEGTDYFLEKIEREDFLRKQRTFDNGSIPHQIHLQEMNAILRRQGEHYPFLKDNKEKIEKILTFRIPYYVGPLARGNRDFAWLTRNSDEAIRPWNFEEIVDKASSAEDFINKMTNYDLYLPEEKVLPKHSLLYETFAVYNELTKVKFIAEGLRDYQFLDSGQKKQIVTQLFKEKRKVTEKDIIQFLHNVDGYDGIELKGIEKQFNASLSTYHDLLKIIKDKEFMDDSKNEEILENIVHTLTIFEDREMIKQRLAQYDSLFDEKVIKALIRRHYTGWGKLSAKLIDGICDKQTGNTILDYLIDDGKNNRNFMQLINDDGLSFKEITQKAQVVGKTDDVKQVVQELPGSPAIKKGILQSIKIVDELVKVMGHTPESIVIEMARENQTTARGKKNSQQRYKRIEDALKNLASGLDSNILKEHPTNNIQLQNDRLFLYYLQNGRDMYTGKPLDINQLSSYDIDHIVPQAFIKDDSLDNRVLTSLKDNRGKSDNVPSIEVVQKRKAFWQQLLDSKLISERKFNNLTKAERGGLDERDKVGFIKRQLVETRQITKHVAQILDARFNKEVNEKDKKNRTVKIITLKSNLVSNFRKEFRLYKVREINDYHHAHDAYLNAVVAKAILKKYPKLEPEFVYGDYQKYDLKRYISRSRNPKEVEKATEKYFFYSNLLNFFKEEVHYADGTIVKRENIEYSKDTGEIAWNKEKDFATIKKVLSYPQVNIVKKREVQTGGFSKESILPKGNSDKLIPRKTKDILWETTKYGGFDSPVIAYSILLIADIEKGKAKKLKTVKTLVGITIMEKAAFEENPITFLENKGYHNVRKENILCLPKYSLFELENGRRRLLASAKELQKGNEIVLPVYLTTLLYHSKNVHKLDEPEHLEYIQKHRNEFKDLLNLVSEFSQKYVLADANLEKIQNLYADNEQADIEILANSFINLLTFTALGAPAAFKFFGKDIDRKRYTTVSEILNATLIHQSITGLYETRIDLSKLGED

SEQ ID NO: 748 - protein, 1121 aa, Streptococcus oralis
MNGLVLGLDIGIASVGVGILEKNSGKIIHANSRLFPAATADNNVERRKNRQARRLNRRKKHRGVRFQDLFEDYGLLTDFSKVSINLNPYRLRVDGLNQQLTNEELFIALKNIVKRRGISYLDDASEDGGAVSSDYGKAVEENRKLLAEQTPGQIQLERFEKYGQVRGDFTVVENGEKCRLINVFSTSAYRKEAEKILRKQQEFNNQITDEFIEDYLKILTGKRKYYHGPGNEKSRTDYGRFRTDGTTLDNIFGVLIGKCTFYPNEYRASKSSYTAQEFNLLNDLNNLTVPTETKKLSEEQKKVIVEYAKEAKTLGASTLLKYIVKMIDASVDQISGYRVDVNNKPEMHTFEVYRKMQSLETISVGELSRNVLDELAHILTLNTEREGIEEAINSKLMGVFSQDQVLELVQFRKNNSSLFSKGWHNFSLKLMMELIPELYETSEEQMTILTRLGKQKSKETSKRTKYIDEKELTEEIYNPVVAKSVRQAIKIINEATKKHGIFDNIVIEMARENNEEDAKKDYIKRQKANQDEKNAAMEKAAFQYNGKKELPGNIFNGHKELATKIRLWHQQGEKCLYTGKTIPISDLIHNQYKYEIDHILPLSLSFDDSLSNKVLVHATANQEKGQRTPFQALDSMDDAWSYREFKSYVKDLKSLSNKKKDYLLTEEDISKIEVKQKFIERNLVDTRYSSRVVLNALQDFYKSHQFDTTISVVRGQFTSQLRRKWGLEKSRETYHHHAVDALIIAASSQLRLWKKQNNPLITYKEGQFVDSQTGEIISLTDDEYKELVFKAPYDHFVDTLHSKTFEDGILFSYQVDSKYNRKISDATIYATRKAKLDKDKSEETYVLGKIKDIYSQAGYDAFIKIYNKDKRKFLMYHKDPQTFEKVIEEILRTYPSKERNDKNKEVPCNPFEKYRQENGPIRKYSKKGNGPEIKCLKYYDNKLGNYIDISPDGSDNQVVLQSLKPWRTDVYFNHQTKEYELMGLKYSDLSFEKGSGKYSISNEKYNSIKRIEGVNEQSEFKFTLYKNDLILIKDSENNEQKLFRFNSRNDTAKHYVELKPYDKARFDGQQELITILGNVAKGGQCLKGLNKSNISIFKVKTDVLGKKHIIKKEGDEPKLKF

SEQ ID NO: 749 - protein, 1134 aa, Streptococcus oralis
MNGLVLGLDIGIASVGVGILEKNSGKIVHASSRIFPAATADNNVERRKNRQARRLHRRKKHRGARLKDLFEYYGLLTDFSKVSINLNPYRLRVDGLDQQLTNEELFIALKNIVKRRGISYLDDASEDGGTVSSDYGKAVEENRKLLAEQTPGQIQLERFEKYGQLRGDFTVVENSEKCRLINVFSTSAYKKEAERILRKQQEFNNQITDEFIEDYLKILTGKRKYYHGPGNEKSRTDYGRFRTDGATLDNIFGILIGKCTFYPNEYRASKASYTAQEFNLLNDLNNLTVPTETKKLSEEQKKTIIEYAKSAKTLGASTLLKYIAKMIDASVDQIRGYRVDVNNKPEMHTFEVYRKMQSLETISVGELSRNILDELAHILTLNTEREGIEEAINTKLRDSFSQDQVLELVQFRKNNSSLFSKGWHNFSLKLMMELIPELYETSEEQMTILTRLGKQKSKETSKRTKYIDEKEVTEEIYNPVVAKSVRQAIKIINEATKKHGIFDNIVIEMARENNEEDAKKDYIKRQKANQDEKYAAMEKAAFQYNGKKELPDNIFHGHKELATKIRLWHQQGEKCLYTGKSIPISDLIHNQYKYEIDHILPLSLSFDDSLSNKVLVLATANQEKGQRTPFQALDSMDDAWSYREFKSYVKESKLLGNKKKEYLLTEEDISKIEVKQKFIERNLVDTRYSSRVVLNALQDFYKNHNFDTTISVVRGQFTSQLRRKWGLEKSRETYHHHAVDALIIAASSQLRLWKKQNNPLIAYKEGQFVDSQTGEIISLTDDEYKELVFKAPYDHFVDTLSSKTFEDSILFSYQVDSKFNRKISDATIYATRKAKLDKEKKEYTYTLGKIKDIYSLGTKTPSKTGFYKFLDLYNKDKSQFLMFQKDRKTWDEVIEKIMEQYRPFKEYDKAGKLVDFNPFEKYRQENGPIRKYSKKGNGPEIKSLKYYDILLGKHKNITPEGSRNTVALLSLNPWRTDVYYNMETKKYEFLGLKYADLPFEEGGAYGISTETYNELREKEGIGKNSEFKFTLYKNDLILIKDTETNCQQFFRFWSRTGKDNPKSFEKHKIELKPYEKAKFEKGEELEVLGKVPPSSNQFQKNMQIENLSIYKVKTDVLGNKHFIKKEGDKPKLKF

SEQ ID NO: 750 - protein, 550 aa, Streptococcus oralis
MYSLDKNGSPTPLYRDQLNQYEVDHIIPYSFLPIDSIDNKVLTHRENNQRKLDNIPDKETVANMKPFWEKLYNAKLISQTKYQRLTTSERTPDGVLTESMKAGFIERQLVETRQIIKHVARILDNRFSDTKIITLKSQLVTNFRNTFHIAKIRELNDYHHAHDAYLAVVVGQTLLKAYPKLAPELIYGHHAHFNRHEENKATIRKYLYSNIMRFFNNPDSKVSKDIWDCNRDLPIIKDIIYNSQVNFVKRTMIKKGAFYNQNPVGKFNKQIAANNRYPLKTKVSSLDTSIYGGYGPMNSALSIIIIAERFNEKKCKIETVKEFHDIFIIDYKKFNNDPFQFLNDTSENGFLKKNNINRVLAFYRVPKYSLMQKIDGTRMLFESKSNLHKATQFKLTKTQNELFFHMRRLLTKSNLMDLKSESAIKESQNFILKHKEEFDNISNQLSAFSQKMLGDTTSLKNLIKGYNERKIKEINSSEETIKYFYDNFIKMFSFVKSGAPKDINDFFNNKYTVARMRPKPDKKLLNATLIHQSITGLYETRIDLSKLGED

SEQ ID NO: 751 - protein, 1140 aa, Streptococcus parasanguinis
MNGLVLGLDIGIASVGVGILKKDIGEIIHTNSRLFSAATADSNIERRGHRGGKRLTRRKKHRSIRLHDLFEDFGLLTDFSKVSINLNPYQLRVQGLDNQLTNEELFIALKNIVKRRGISYLDDASEDGGTVSSDYGKAVEENRKLLAEQTPGQIQLDRFEKYGQVRGDFNVVENGEKRRLINVFTTSAYSKEAERILRKQQEFNKKITDEFIEDYLTILTGKRKYYHGPGNEKSRTDYGRYTTKKDPEGKYITLDNIFGILIGKCTFYPDEYRASKASYTAQEFNLLNDLNNLTVPTETKKLSEEQKKTIIKYAKTAKTLGASTLLKYIAKLIGASVDQIHGYRIDPNKKPEMHTFETYRKMQSLETISVEELPRKVLDELAHILTLNTEREGIEEAINATLKDTFSQDQVLELVQFRKNNSSLFSKGWHSFSLKLMMELIPELYETSEEQMTILTRLGKQKSKETSKRTKYIDEKELTEEIYNPVVAKSVRQAIKIINEATKKYGIFDNIVIEMARENNEEDAKKEYIKRQKANLDEKNAAMEKAAFQYNGKKELPDNVFHGHKELATKIRLWHQQGEKCLYTGKNIPISDLIQNQYKYEIDHILPLSLSFDDSLSNKVLVLATANQEKGQRTPFQALDSMDDAWSYREFKSYVKDSKLLGNKKKEYLLTEEDISKIEVKQKFIERNLVDTRYSSRVVLNALQDFYKEHQFDTTISVVRGQFTSQLRRKWGLEKSRETYHHHAVDALIIAASSQLRLWKKQNNPLISYTEGQFVDQVTGEIISLSDDEYKELVFKAPYDHFVDTLKSKKFEDSILFSYQVDSKYNRKISDATIYATRKAKLDKENKEYTYTLGKIKDIYALGTKSPSKTGFYKFLDLYNKDKSQFLMFQKDRKTWDEVIEKIIEQYRPFKEYDENGKEVDFNPFEKYRIENGPIRKYSKKGNGPEIKSLKYYDNLLGKFVDITPSESKNPVALLSLNPWRTDVYYNTETSKYEFLGLKYADLCFEKGGAYGISEVKYNKIREKEGIGKESEFKFTLYKNDLILIKDTETNCQQIFRFWSRTGKDNPKSFEKHKIELKPYEKARFEKGEELEVLGKVPPSSNQLQKNMQIENLSIYKVKTDVLGNKHFIKKEGEEPKLKF

SEQ ID NO: 752 - protein, 1374 aa, Streptococcus pseudoporcinus
MKKRYSYSIGLDIGTNSVGWAVINEDYKVPAKKMTVFGNTDRKTIKKNLLGTVLFDSGETAQARRLKRTNRRRYTRRRYRLCQLQNIFATEMVKVDDTFFQRLSESFFYYQDKAFDKHPIFGNSKEERAYHKTYPTIYHLRKDLADRDQKADLRLIYLALSHIIKFRGHFLIEGKLNSENTDVQKLFIALVTVYNLLFEEEPIAGETCDAKALLTAKTSKSKRLESLISEFPGQKKNGLFGNLLALALGLRPNFKSNFGLSEDAKLQITKDTYEEELDNLLAEIGDHYADLFLAAKNLSDAILLSDILTLSDENTRAPLSASMIKRYEEHQEDLALLKKLVKEQMPEKYWEIFSNAKKNGYAGYIEGKVSQEDFYRYIKPILSRLKGGDEFLAKIDRDDFLRKQRTFDNGSIPHQIHLKELHAILRRQEKYYPFLAEQKEKIEQLLCFRIPYYVGPLAKGGNSSFAWLKRRSDEPITPWNFKDVVDEEASAQAFIEGMTNYDTYLPEEKVLPKHSPLYEMFTVYNELTKVKYIAENMTKPLYLSAEQKEAIIDHLFKQTRKVTVKDLKEKYFSQIEGLENVDVTGVEGAFNASLGTYNDLLKIIKDKAFLDDEANAEILEEIVLILTLFQDEKLIEKRLAKYANLFEKSVLKKLRKRHYRGWGRLSRQLIDGMKDKASGKTILDFLKADDFANRNFIQLINDSSLDFEKLIDDAQKKAIKRESLTEAVANLAGSPAIKKGILQSLKVVDEIVKVMGHNPDNIVIEMSRENQTTAQGLKNARQRLKKIKEVHKKTGSRILEDNSERITNLTLQDNRLYLYLLQDGKDMYTGQDLDINNLSQYDIDHIIPQSFIKDNSIDNLVLTTQKANRGKSDNVPSIEVVRDMKDRVWRRQLANGAISRQKFDHLTKAERGGLADSDKARFLRRQLVETRQITKHVAQLLDSRFNSKSNQNKKLARNVKIITLKSKIVSDFRKDFGLYKLREVNNYHHAHDAYLNAVVGTALLKKYPKLEAEFVYGDYKHFDLVKLISKSDPSLGKATAKVFFYSNIMNFFKEELSLADGTLMKRPVIETNTETGEVVWDKVKDFKTIRKVLSYPQVNIVKKTEIQSGAFSKESVLSKGNSDKLIERKKGWDPKKYGGFDSPNTAYSIFVVAKVAKRKAQKLKTVKEIVGITIMEQAEYEKDNIAFLEKKGYQDIQEKLLIKLPKYSLFELENGRRRLLASANEFQKGNELALSGKYMKFLYLASRYDKLSSKIESEQQKKLFVEQHLHYFDEILDIVVKHATCYIKAENNLKKIISLYKKKEAYSINEQALNMLNLFIFTSLGAPSTFVFFDETIDRKRYTTSSDVLNGILIQQSITGLYETRIDLSRFGGD

SEQ ID NO: 753 - protein, 1052 aa, Streptococcus pyogenes
LSASMIKRYDEHHQDLTLLKALVRQQLPEKYKEIFFDQSKNGYAGYIDGGASQEEFYKFIKPILEKMDGTEELLAKLNREDLLRKQRTFDNGSIPHQIHLGELHAILRRQEDFYPFLKDNREKIEKILTFRIPYYVGPLARGNSRFAWMTRKSEETITPWNFEEVVDKGASAQSFIERMTNFDKNLPNEKVLPKHSLLYEYFTVYNELTKVKYVTEGMRKPAFLSGEQKKAIVDLLFKTNRKVTVKQLKEDYFKKIECFDSVEISGVEDRFNASLGTYHDLLKIIKDKDFLDNEENEDILEDIVLTLTLFEDREMIEERLKTYAHLFDDKVMKQLKRRRYTGWGRLSRKLINGIRDKQSGKTILDFLKSDGFANRNFMQLIHDDSLTFKEDLQKAQVSGQGDSLHEHIANLAGSPAIKKGILQTVKVVDELVKVMGRHKPENIVIEMARENQTTQKGQKNSRERMKRIEEGIKELGSDILKEYPVENTQLQNEKLYLYYLQNGRDMYVDQELDINRLSDYDVDHIVPQSFLKDDSIDNKVLTRSDKNRGKSDNVPSEEVVKKMKNYWKQLLNAKLITQRKFDNLTKAERGGLSELDKAGFIKRQLVETRQITKHVAQILDSRMNTKYDENDKLIREVRVITLKSKLVSDFRKDFQFYKVREINNYHHAHDAYLNAVVGTALIKKYPKLESEFVYGDYKVYDIRKMIAKSEQEIGKATAKYFFYSNIMNFFKTEITLANGEIRKRPLIETNGETGEIVWDKGRDFATVRKVLSMPQVNIVKKTEVQTGGFSKESILPKRNSDKLIARKKDWDPKKYGGFDSPTVAYSVLVVAKVEKGKSKKLKSVKELVGITIMERSSFEKDPVDFLEAKGYKEVRKDLIIKLPKYSLFELENGRKRMLASAGELQKGNELALPSKYVNFLYLASHYEKLKGSPEDNEQKQLFVEQHKHYLDEIIEQISEFSKRVILADANLDKVLSAYNKHRDKPIREQAENIIHLFTLTNLGAPAAFKCFDTTIGRNRYKSIKEVLDATLIHQSITGLYETRIDLSQLGGD

SEQ ID NO: 754 - protein, 1368 aa, Streptococcus pyogenes; identical to SEQ ID NO: 42

SEQ ID NO: 755 - protein, 1367 aa, Streptococcus pyogenes; identical to SEQ ID NO: 246

SEQ ID NO: 756 - protein, 1368 aa, Streptococcus pyogenes [sequence omitted]

SEQ ID NO: 757 - protein, 1370 aa, Streptococcus ratti
MKKPYSIGLDIGTNSVGWAVITDDYKVPAKKMKVLGNTDKNYIKKNLLGALLFDSGNTAEDRRLKRTARRRYTRRRNRLLYLQDIFSDEMNKVDESFFHRLEDSFLVSEDKRGDHHPIFGNVVDEVKYHEQFPTIYHLRKYLADTPEKADLRLVYLALAHMIKFRGHFLIDDPKLDVKNTDSQELFSQFLTAYDVTQEDSHLADVKINISDIITEKMNKSRKVEALLFHFPSQKKNSFFGNLVSLVFGLLPNFKTNFNLAEDAKLQLSKDSYDEDLENLLGQIGDEYTDVFVAARKLYDSILLSGILTVNDLSTKAILSASMVRRYEEHNKDLAKLKAFVKANFTHDVFKEVFSDASKNGYAGYIEGKTSQEDFYKYVKNLIGKVDGSADFIEKIDREDFLRKQRTFDNGSIPHQVHLAEMKAILRRQGEYYPFLKEHAEKIQQILTFRIPYYVGPLDRHGHSDFAWASFNSEEKVTPWNFEEIIDKNKSAQAFIERMTNQDLYLPNEKVLPKHSPLYEKYTVYNELTKIKYVTETGTAKFFDANLKQEIFDGLFKKERKVTKRKLLTFLEKNFDEFRIVDIQGLDKETETFNASYGIYQDLLKIIKDKAFMDDSENADILEDIVLTLTLFEDREMIKQRLAKYADLFDKKVIDNLARRRYTGWGRLSAKLLNGIRDKRSRKTIMDYLVDDGRSNRNLMQLITDDNLTFKDEIAKAQYSDNSDDLHQVVQDLAGSPAIKKGILQSVKIVDELVKVMGYEPEQIVVEMARENQTTAKGRRNSQQRYKRLEEAIKNLDRDLNYKILKEHPTDNQALQNDRLFLYYLQNGRDMYTGESLDINRLSDYDIDHIIPQAFIKDNSIDNRVLVSSAKNRGKSDDVPSEDVVNRMRPFWNKLLNCGLISQRKYSNLTKKELTPNDKAGFIKRQLVETRQITKHVARILDEHFNKEFDEDKKRIRKVKVVTLKSNLVSNFRKEFELYKVREINDYHHAHDAYLNAVVAKALLMKYPKLEPEFVYGEYPKYNSYRERKTATQRMFFYSNIMNMFKSKVKLADERIIERPMIEVNDETGEIAWDKTKHIATVKKVLSYPQINIVKKVEEQTGGLTNETIYPRGSFDKLLNRKNTLEASKYGGFGSPTVAYCVLVVADSKNENGKVKKLKLGSELLGITILEKNDFENNSLDFLSRKGYQGVQEKKIIKLPKYSLFEFQDGSRRMLSSVMANDNKRGDLQKANEMILPAYLVKLLYHAKHINSVGEPAHKNYINEHCSEFQDLLNYIRQFADKFVDVDKNLSKIRSLSKSMAEYSVSEICSSFVNLLTLTALGAPADFKFFGTTIPRKRYGSPQSILSATLIHQSITGLYETRIDLSKLGED

SEQ ID NO: 758 - protein, 1135 aa, Streptococcus salivarius
MSDLVLGLDIGIGSVGVGILNKVTGEIIHKNSRIFPAAQAENNLERRTNRQGRRLTRRKKHRRVRLNHLFEESGLITDFTKVSINLNPYQLRVKGLTAELSNEELFIALKNMVKHRGISYLDDASDDGNSSVGDYAQIVKENSKQLETKTPGQIQLERYQKYGQLRGDFTVEEDGRKHRLINVFPTSAYHAEALRILQTQQEFNPQITDEFINSYLEILTGKRKYYHGPGNEKSRTDYGKYTTKKDAQGQYITLNNIFGILIGKCTFYPEEYRAAKASYTAQEFNLLNDLNNLTVPTETKKLSEEQKYQIITYVKNEKAMGPAKLFKYIAKLLACDIADIKGYRIDKSDKAEIHTFEAYRKMKTLETIDIEQIEREKLDKLAYVLTLNTEREGIQEALDHEFADGTFSQEQVDELVQFRKANSSIFGKGWHSFSVKLMMELIPELYATSEEQMTILTRLGKQKTTSSSNKTKYIDEKQLTEEIYNPVVAKSVRQAIKIVNAAIKKYGDFDNIVIEMARETNEDDEKKAIQKIQKANKAEKDAAMRKAANQYNGKAELPHSVFHGHKQLATKIRLWHQQGERCLYTGKTISIHDLINNPNQFEIDHILPLSITFDDSLANKVLVYATANQEKGQRTPYQALDSMDDAWSFRELKAFVRESKALSNKKKEYLLTEEDISKFDVRKKFIERNLVDTRYASRVVLNALQEHFKAHKIDTKVSVVRGQFTSQLRRHWGIDKTRDTYHHHAVDALIIAASSQLNLWKKQKNTLVSYSEDQLLDIETGELISDDEYKESVFKAPYQHFVDTLKSKEFEDSILFSYQVDSKFNRKISDATIYATRQAKVGKDKKDETYVLGKIKDIYALGTKTPSKTGFYKFLDLYNKDKSQFLVYQKDRKTWDEVIEKIMEQYRPFKESDKNGKEVDFNPFEKYRIENGPIRKYSRKGNGPEIKSLKYYASKLGNHIDITPKDSNNKVVLQSVSPWRADVYFNKTTGSYEILGLKYADLQFEKGTGTYRISEEKYNDIKKKEGVDSDSEFKFTLYKNDLLLIKDTETKEQRLFRFLSRSMPNKKHYVELKPYSKDKFEKNESLIEILGSADKSGRCIKGLAKSNLSIFKVRTDVLGNQHIIKNEGDKPKLDF

SEQ ID NO: 759 - protein, 1127 aa, Streptococcus salivarius
MSDLVLGLDIGIGSVGVGILNKVTGEIIHKNSRIFPAAQAENNVERRINRQGRRLTRRKKHRRVRLNHLFEESGLITDFTNVSINLNPYQLRVKGLTDELSNEELFIALKNMVKHRGISYLDDASDDGNSSVGDYAQIVKENSKQLETKTPGQIQLERYQKYGQLRGDFTVEEDGKKHRLINVFPTSAYRAEALRILQTQQEFNPQITDEFINSYLQILTGKRKYYHGPGNEKSRTDYGRYTTKKDSEDEYITLDNIFGILIGKCTFYPEEYRAAKASYTAQEFNLLNDLNNLTVPTETKKLSEEQKNQIITNVKNEKAMGPAKLFKYIAKLLSCDVADIKGYRIDKSDKAEIHTFEAYRKMKTLATIDIEQMERENLDKLAYVLTLNTEKEGIQEALEHEFADGTFSQEQIDELVQFRKANSSIFGKGWHSFSVKLMMELIPELYATSEEQMTILTRLGKQKTTSSSNKTKYIDEKQLTEEIYNPVAAKSVRQAIKIVNAAIKEYGDFDNIVIEMARETNEDDEKKAIQKIQKANKDEKDAAMLKAANQYNGKAELPHSVFHGHKQLATKIRLWHQQGERCLYTGKTISIHDLINNSNQFEIDHILPLSITFDDSLANKVLVYATANQEKGQRTPYQALDSMDDAWSFRELKAFVRDSKALSNKKKEYLLTEEDISKFDVRKKFIERNLVDTRYASRVVLNALQEHFRVHKTDTKVSVVRGQFTSQLRRHWGIEKTRDTYHHHAVDALIIAASSQLNLWKKQKNTLVSYSEDQLLDIETGELISDDEYKESVFKAPYQHFVDTLKSKEFEDSILFSYQVDSKFNRKISDATIYATRQAKVGKDKKDETYVLGKIKDIYSQTGYDAFIKIYKKDKSKFLMYRHDPQTFEKVIEPILENYPNKELNEKGKEVPCNPFLKYKEDHGYIRKYSKKGNGPEIKSLKYYDSKLGNHIDITPKNSNNKVVLQSVSPWRADVYFNKTTGKYEILGLKYADLKFEKGTGTYKISEEKYNDIKIKEGVDSDSEFKFTLYKNDLLLIKDTETKEQQLFRFLSRTMPNVKHYVELKPYDKQKFDDNEELIKILGIVAKGGQCKKGVSKPNISIYKIRTDVLGNQHIIKNEGDKPKLDF

SEQ ID NO: 760 - protein, 1385 aa, Streptococcus salivarius
MTKPYSIGLDIGTNSVGWAVITDDYKVPSKKMKVLGNTSKKYIKKNLLGALLFDSGITAEGRRLKRTARRRYTRRRNRILYLQEIFSTEMATLDDAFFQRLDDSFLVPDDKRDSKYPIFGNLVEEKVYHDEFPTIYHLRKHLADSSKKADLRLVYLALAHMIKYRGHFLIEGDFNSKNNDLQKNFQDFLDTYNAIFESDLSLENSKQLEEIVKDKISKSAKKDRILKLFPGEKNSGIFSEFLKLIVGNQADFRKYFNLDEKTSLQFSKESYDEDLETLLGHIGDDYSDVFLKAKKLYDAILLSGILTVTDNGTEAPLSSAMIMRYKEHEEDLALLKAYIRNISLETYNEVFKDNTKNGYAGYIDGKTSQEDFYVYLKRLLAGLEGADYFLEKIDREDFLRKQRTFDNGSIPYQIYLQEMRAILDKQAKFYPFLAKNKERIEKILTFRIPYYVGPLARGNSDFAWSIRKRNEKITPWNFEDVIDKESSAEAFINRMTSFDLYLPEEKVLPKHSLLYENFTVYNELTKVRFIAEGMRDYQFLDSKQKKDIVRLYFKGKRKVTDKDIIEYLHAIDGYDGIELKGIEKQFNSSLSTYHDLLNIINDKEFLDDSSNETIIEEIIHTLTMFEDREMIKQRLSKFDNIFDKSVLKKLSRRHYTGWGKLSAKLINGIRDEKSGNTILDYLIDDGVSNRNFMQLIHDDALSFKKKIKKAQIIGDKDNIKQVVKSLPGSPAIKKGILQSIKIVDELVKVMGREPESIVVEMARENQYTNQGKSNSQQRLKRLEESLKGLGSKILKENVPTRLSKIDNNALQNDRLYLYYLQNGKDMYTGEELDIDRLSNYDIDHIIPQAFLKDDSIDNKVLVSSASNRGKSDDVPSLEVVKKRKTLWYQLLKSKLISQRKFDNLTKAERGGLSQEEKAGFIQRQLVETRQITKHVARLLDERFNNKKDENNRTLRTVKIITLKSSLVSQFRKDFELYKVREINDFHHAHDAYLNAVVASALLKKYPKLEPEFVYGDYPKYNSFRERKSATEKVYFYSNIMNIFKKSIPLADGTVIDRPLIEVNEETGESVWNKVADLNTVRKVLSYSQVNIVKKVEEQNHGLDRGKPKGLFNANLSSKPKPNSKENLVGAKEYLDPKKYGGYAGISNSFAILVKGTIEKGAKKKITNVLEFQGISILDRIYYRKDKLNFLLEKGYKDIELIIELPKYSLFELSDGSRRMLASILSTNNKRGEIHKGNQIFISQKFVKLLYHAKRISSTFNENHRKYVENHKKEFEELFYYILEFNENYVGAKKNGELLKSAFQSWQNHSIDELCSSFIGPTGSERKGLFELTSRGGAADFEFLGVKIPRYRDYTPSSLLKDATLIHQSVTGLYETRIDLGKLGED

SEQ ID NO: 761 - protein, 1392 aa, Streptococcus sanguinis
MENKNYSIGLDIGTNSVGWAVITDDYKVPSKKMKVFGNTDKHFIKKNLIGALLFDEGATAEDRRLKRTARRRYTRRKNRLRYLQEIFSEEISKLDSSFFHRLDDSFLVPKDKRGSKYPIFATLEEEKEYHKKFPTIYHLRKHLADSKEKTDLRLIYLALAHMIKYRGHFLYEESFDIKNNDIQKIFNEFISIYDNTFEGSSLSGQNAQVEAIFTDKISKSAKRERVLKLFSDEKSTSLFSEFLKLIVGNQADFKKHFDLEEKAPLQFSKDTYDEDLENLLGQIGDGFTDLFLVAKKLYDAILLSGILTVTDPSTKAPLSASMIERYESHQKDLAALKQFIKNNLPKRYNEVFSDQSKDGYAGYIDGKTTQEAFYKYIKNLLSKFEGADYFLDKIEREDFLRKQRTFDNGSIPHQIHLQEMNAILRRQGEHYPFLKENREKIEKILTFRIPYYVGPLARGNRDFAWLTRNSDQAIRPWNFEEIVDKASSAEEFINKMTNYDLYLPEEKVLPKHSLLYETFAVYNELTKVKFIAEGLRDYQFLDSGQKKQIVNQLFKEKRKVTEKDIIHYLHNVDGYDGIELKGIEKQFNASLSTYHDLLKIIKDKEFMDDPKNEEILENIVHTLTIFEDREMIKQRLAQYDSIFDEKVIKALTRRHYTGWGKLSAKLINGICDKQTGDTILDYLIDDGKINRNFMQLINDDGLSFKEIIQKAQVVGKTDDVKQVVQELPGSPAIKKGILQSIKIVDELVKVMGYAPESIVIEMARENQTTARGKKNSQQRYKRIEDSLKNLAPGLDSNILKENPTDNIQLQNDRLFLYYLQNGKDMYTGKPLDIDQLSSYDIDHIIPQAFIKDDSIDNRVLTSSKDNRGKSDNVPSLEVVQKRKAFWQQLLDSKLISERKFNNLTKAERGGLDERDKVGFIRRQLVETRQITKHVAQILDASFNTEVNEKNQKIRTVKIITLKSNLVSNFRKEFELYKVREINDYHHAHDAYLNAVVAKAILKKYPKLEPEFVYGDYQKYDLKRYISRFKPSKEIEKATEKYFFYSNLLNFFKEEVHYADGIIVKRENIEYSKDTGEIAWNKEKDFATIKKVLSYPQVNIVKKTEIQTHGLDRGKPKGLFNSNPSPKPSEDSKENLVPIKQGLDPRKYGGYAGISNSYAVLVKAIVEKGAKKQQKTILEFQGISILDKINFENNKENYLLKKRYIEILSTITLPKYSLFEFPDGTRRRLASILSTNNKRGEIHKGNELVLPGKYTTLLYHAKNINKKLEPEHLEYVEKHRNDFAKLLECVLNFNDKYVGALKNGERIRQAFTDWETVDIEKLCFSFIGPENSKNAGLFELTSQGSASDFEFLGVKIPRYRDYAPSSLLKATLIHQSITGLYETRIDLSKLGED

SEQ ID NO: 762 - protein, 1377 aa, Streptococcus sanguinis
MKKPYSIGLDIGTNSVGWAVITDDYKVPSKKMKVLGNTDKHFIKKNLIGALLFDEGTTAEDRRLKRTSRRRYTRRKNRLRYLQEIFSEEISKLDSSFFHRLDDSFLVPEDKRGSKYPIFATLEEEKEYHKKFPTIYHLRKHLADSKEKTDLRLIYLALAHMIKYRGHFLYEESFDIKNNDIQKIFNEFISIYDNTFEGSSLSGQNAQVEAIFTDKISKSTKRERVLKLFSDEKSTGLFSEFLKLIVGNQADFKKHFDLEEKAPLQFSKDTYDEDLENLLGQIGDGFADLFLVAKKLYDAILLSGILTVTDPSTKAPLSASMIERYENHQEDLAALKQFIKNNLSEKYAEVFSDQSKDGYAGFIDGKTTQEAFYKYIKNLLSKLEGADYFLNKIEREDFLRKQRTFDNGSIPHQIHLQEMNAILRRQGEHYLFLKENREKIEKILAFRIPYYVGPLARGNRDFAWLTRNSDQAIRPWNFEEVVDKASSAEDFINKMTNYDLYLPEEKVLPKHSLLYETFAVYNELTKVKFIAEGLRDYQFLDSGQKKQIVNQLFKDKRKVTEKDIIHYLHNVDGYDGIELKGIEKQFNASLSTYHDLLKIIKDKEFMDNPKNGEILENIIHTLTIFEDREMIKQRLAQYDTLFDEKVIKALTRRHYTGWGKLSAKLINGIRDKQTGKTILEYLIDDGDCNRNFMQLINDDGLSFKEIIQKAQVVGKTDDVKQVVQEIPGSPAIKKGILQSIKIVDELVKVMGHNPESIVIEMARENQTTAKGKKNSQQRYKRIEDALKNLAPGLDSNILKENPTDNIQLQNDRLFLYYLQNGKDMYTGKAIDINQLSNYDIDHIIPQAFIKDDSLDNRVLTSSKDNRGKSDNVPSIEVVQKRKAFWQQLLDSKLISERKFNNLTKAKRGGLDERDKVGFIKRQLVETRQITKHVAQLLDTRFNTEVNEENQKIRTVKIITLKSNLVSNFRKEFGLYKVREINDYHHAHDAYLNAVVAKAILKKYPKLEPEFVYGDYQKYDLKRYILKSKASNTIDKATEKYFFYSNLLNFFKEKVRYADGTIKKRENIEYSNDTGEIAWNKEKDFATIKKVLSLPQVNIVKKTEEQTVGQNGGLFDNNIVSKKKVVDASKLIPIKSSLSPEKYGGYARPTIAYSVLVIADIEKGKGKAKKLKRIKEIVGITIQDKKKFESNPVTYLEECGYKNINSNLIIKLPKYSLFEFNDGQRRLLASSIELQKGNELILPYHLTALLYHAQRINKISEPIHKQYVEAHQNEFKELLTTIISLSKKYIQKPNVELLLQQAFDQADKDIYQLSESFISLLKLTSFGAPGAFKFLGVEISQSSVRYKPNSQFLDTTLIHQSITGLYETRIDLSKLGED

SEQ ID NO: 763 - protein, 1370 aa, Streptococcus sanguinis
MKKPYSIGLDIGTNSVGWAVVTDDYKVPAKKMRVFGDTDRSHIKKNLLGTLLFDDGNTAESRRLKRTARRRYTRRRNRILYLQEIFTESMNEIDESFFHRLDDSFLVPEDKRGSKYPIFATLQEEKEYHKQFPTIYHLRKQLADSKEKSDVRLIYLALAHMIKYRGHFLYEETFDIKNNDIQKIFNEFINIYDNTFEGSSLSGQNAQVEAIFTDKISKSAKRERVLKLFPDEKSTGLFSEFLKLIVGNQADFKKHFDLEEKAPLQFSKDTYDEELENLLGQIGDDFADLFLIAKKLYDAILLSGILTVTDPSTKAPLSASMIERYENHQKDLAALKQFIKNNLPEKYVEVFSDQSKDGYAGYIDGKTTQEAFYKYIKNLLSKFEGADYFLDKIEREDFLRKQRTFDNGSIPHQIHLQEMNAILRRQGEHYPFLKENREKIEKILTFRIPYYVGPLARDNRDFSWLTRNSDEPIRPWNFEEVVDKARSAEDFIHRMTNYDLYLPEEKVLPKHSLLYETFAVYNELTKVKFIAEGLRDYQFLDSGQKKQIVNQLFKEKRKVTEKDIIHYLHNVDGYDGIELKGIEKQFNANLSTYHDLLKITKDKEFMDDPKNEEILENIVHTLTIFEDREMIKQRLAQYDTLFDEKVIKALTRRHYTGWGKLSAKLINGIRDKQSGKTILDYLIDDDKINRNFMQLINDDGLSFKEIIQKAQVVGKTDDVKQVVQELPGSPAIKKGILQSIKIVDELVKVMGYALESIVIEMARENQTTARGKKNSQQRYKRIEDALKNLAPGLDSNILKENPTDNIQLKNDRLFLYYLQNGKDMYTGKPLDINQLSSYDIDHIIPQAFIKDDSIDNRVLTSSKDNRGKSDNVPSLEVVQKRKAFWQQLLDSKLISERKFNNLTKAERGGLDERDKVGFIRRQLVETQQITKNVAQILDARFNTEVKEKNQKIRTVKIITLKSNLVSNFRKEFGLYKVREINNYHHAHDAYLNAVVAKAILKKYPKLEPEFVYGDYQKYDLKKYISRFKPSKEIEKATEKYFFYSNLLNFFKEEVLYADGTIRKRENIEYSKDTGEIAWDKEKDFATIKKVLSYPQVNIVKKREVQTGGFSKESILPKGNSDKLIPRKTKDILWDTTKYGGFDSPVIAYSILLIADIEKGKAKKLKTVKTLVGITIMEKAAFEENPITFLENKGYHNVRKENILCLPKYSLFELENGRRRLLASAKELQKGNEIVLPVCLTTLLYHSKNLHKLDEPEHLEYIQKHRNEFKDLLNLVSEFSQKYILAEANLEKIKDLYADNEQADIEILANSFINLLTFTALGAPAAFKFFGKDVDRKRYTTVSEILNATLIHQSITGLYETRIDLSKLGEE

SEQ ID NO: 764 - protein, 1421 aa, Streptococcus sanguinis
MTKFNKNYSIGLDIGVSSVGYAVVTEDYRVPAFKFKVLGNTEKEKIKKNLIGSTTFVSAQPAKGTRVFRVNRRRIDRRNHRITYLRDIFQKEIEKVDKNFYRRLDESFRVLGDKSEDLQIKQPFFGDKELETAYHKKYPTIYHLRKHLADADKNSPVADIREVYMAISHILKYRGHFLTLDKINPNNINMQNSWIDFIESCQEVFDLEISDESKNIADIFKSSENRQEKVKKILPYFQQELLKKDKSIFKQLLQLLFGLKTKFKDCFELEEEPDLNFSKENYDENLENFLGSLEEDFSDVFAKLKVLRDTILLSGMLTYTGATHARFSATMVERYEEHRKDLQRFKFFIKQNLSEQDYLDIFGRKTQNGFDVDKETKGYVGYITNKMVLTNPQKQKTIQQNFYDYISGKITGIEGAEYFLNKISDGTFLRKLRTSDNGAIPNQIHAYELEKIIERQGKDYPFLLENKDKLLSILTFKIPYYVGPLAKGSNSRFAWIKRATSSDILDDNDEDTRNGKIRPWNYQKLINMDETRDAFITNLIGNDIILLNEKVLPKRSLIYEEVMLQNELTRVKYKDKYGKAHFFDSELRQNIINGLFKNNSKRVNAKSLIKYLSDNHKDLNAIEIVSGVEKGKSFNSTLKTYNDLKTIFSEELLDSEIYQKELEEIIKVITVFDDKKSIKNYLTKFFGHLEILDEEKINQLSKLRYSGWGRYSAKLLLDIRDEDTGFNLLQFLRNDEENRNLTKLISDNTLSFEPKIKDIQSKSTIEDDIFDEIKKLAGSPAIKRGILNSIKIVDELVQIIGYPPHNIVIEMARENMTTEEGQKKAKTRKTKLESALKNIENSLLENGKVPHSDEQLQSEKLYLYYLQNGKDMYTLDKTGSPAPLYLDQLDQYEVDHIIPYSFLPIDSIDNKVLTHRENNQQKLNNIPDKETVANMKPFWEKLYNAKLISQTKYQRLTTSERTPDGVLTESMKAGFIERQLVETRQIIKHVARILDNRFSDTKIITLKSQLITNFRNTFHIAKIRELNDYHHAHDAYLAVVVGQTLLKVYPKLAPELIYGHHAHFNRHEENKATLRKHLYSNIMRFFNNPDSKVSKDIWDCNRDLPIIKDVIYNSQINFVKRTMIKKGAFYNQNPVGKFNKQLAANNRYPLKTKALCLDTSIYGGYGPMNSALSIIIIAERFNEKKGKIETVKEFHDIFIIDYEKFNNNPFQFLNDTSENGFLKKNNINRVLGFYRIPKYSLMQKIDGTRMLFESKSNLHKATQFKLTKTQNELFFHMKRLLTKSNLMDLKSKSAIKESQNFILKHKEEFDNISNQLSAFSQKMLGNTTSLKNLIKGYNERKIKEIDIRDETIKYFYDNFIKMFSFVKSGAPKDINDFFDNKCTVARMRPKPDKKLLNATLIHQSITGLYETRIDLSKLGED

SEQ ID NO: 765 - protein, 317 aa, Streptococcus sp.
FEDSILFSYQVDSKFNRKISDATIYATRKAKLDKEKSEETYVLGKIKDIYSQAGYDAFIKIYNKDKSKFLMYHKDPQTFEKVIEEILRTYPSKELNDKNKEIPCNPFEKYRQENGPIRKYSKKSNGPEIKSLKYYDNKLGNHIDITPESSDNQVVLQSLKPWRTDVYFNHQTKKYELMGLKYSDLSFEKGSGKYSISNQKYNSIKRIEGIDEQSEFKFTLYKNDLILIKDSENNEQKLFRFNSRNDTAKHYIELKPYDKAKFDGEQELITILGNVAKGGRCLKGLNKSNISIFKVKTDVLGKKHIIKKEGDEPKLKF

SEQ ID NO: 766 - protein, 1420 aa, Streptococcus sp.
MAKFNKNYSIGLDIGVSSVGYAVVTEDYRVPAFKFKVLGNTEKEKIKKNLIGSTTFVPAQSAQGTRVFRVNRRRIDRRNHRIAYLRDIFQKEIEKIDKNFYRRLDESFRVLGDKSEDIQIKQPFFGNKELETAYHKKYPTIYHLRKHLADADKNSPVADIREVYMVLSHILKYRGHFLTLGKIDPNNINMQNSWIDFIESCQDAFDLEISDESKTIAAIFKSSENRQEKVKQILSYFQQELLKKDKSIFKQLLQLLFGLKTKFKDCFELEEEPDLNFSKENYDENLENLLGALEEDFSDVFAKLKILRDTILLSSMLTYTGATHARFSATMVERYEEHRKDLQRFKSFVKQNLSEQDYLDIFGRKTPTGFDVDKETKGYVGYISNKMVLTNPQKQKTIQQNFYDYISGKITGIEGAECFLNKISDGTFLRKLRTTDNGAIPNQIHAYELEKIIERQGRDYPFLLENKDKLLSILTFKIPYYVGPLAKGNNSRFAWIKRTTSQDVLDDNDEDTRNGKIRPWNYHKLINMDETRDAFIINLIGNDIILLNEKVLPKRSLIYEEVMLQNELTRVKYKDKYGKIHFFNSELRQEIINNLFKTNSKRVSSAMLLSYLENFTNLQAVEIVSGIEKGKSLNSTLKTYNDLKTIFSEELLDSEIYQKELEEIIKVITVFDDKKSIKNYLTKYFGHLEFLNEEKINQLSKLRYTGWGRYSGKLLLGIRDEDTGFNLMQFLRNDDENRNLTQLISDTTLSFDSAIKAIQSKSTVEDDVFEEIKNLAGSPAIKRGILNSIKIVDELVQIIGYPPQNIIIEMARENMTTEEGQKKAKTRKSKLESALKNIEDSVLESGKVPHSDEQLQSEKLYLYYLQNGKDMYSLDKTGSPTPLYRDQLDQYEVDHIIPYSFLPIDSIDNKVLTHRENNQRKLNNIPDKETVANMKPFWEKLYNAKLISQTKYQRLTTSERTPDGVLTESMKAGFIERQLVETRQIIKHVARILDNRFSDTKIITLKSQLVTNFRNTFHIAKIRELNDYHHAHDAYLAVVVGQTLLKAYPKLAPELIYGHHAHFNRHEENKATLRKHLYSNIMRFFNNPDSKVSKDIWDCNRDLPIVKDVIYNSQINFVKRTMIKKGAFYNQNPVGKLNKQIAANNRYPLKTKVSSLDTSIYGGYGPMNSALSIIIIAERFNEKKGKIETVKEFHDIFIIDYEKFNNNPFQFLNNVSEEGFLKKNDLNRVLAFYRISKYSLMQKIDGTRMLFESKSNLHKVTQFKLTKTQNELFFHMKRLLTKSNLMDLKSESAIKESQNFIQTHQNEFDNIADRLSNYSQKMLGETKSLQTLINGYNERPIKQIDNNEETIRYYYDNFIKMFSFVKSGAPKDIINFFNDKYTVPRMRPKPDRKMLDATLIHQSITGLYETRIDLSKLGED

SEQ ID NO: 767 - protein, 1371 aa, Streptococcus sp.
MENKNYSIGLDIGTNSVGWSVITDDYKVPSKKMKVLGNTDKHFIKKNLIGALLFDEGTTAEARRLKRTARRRYTRRKNRLRYLQEIFSEEIGKVDSSFFHRLDDSFLIPEDKRGSKYPIFATLAEEKKYHKQFPTIYHLRKQLADSKEKTDLRLIYLALAHMIKYRGHFLYEEAFDIKNNDIQKIFNEFISIYNNTFEGNSLSGQNVQVEAIFTDKISKSAKRERVLKLFPDEKSTGLFSEFLKLIVGNQADFKKHFDLEEKAPLQFSRDTYDEDLENLLGQIGDDFADLFLVAKKLYDAILLSGILTVTNPSTKAPLSASMIERYENHQKDLASLKQFIKNNLPEKYDEVFSDQSEDGYAGYIDGKTTQETFYKYIKNLLSKFEGADYFLDKIEREDFLRKQRTFDNGSIPHQIHLQEMNAILRRQGEHYPFLKENKEKIEKILTFRIPYYVGPLARGNRDFAWLTRNSDQAIRPWNFEEIVDKASSAEDFINKMTNYDLYLPEEKVLPKHSLLYETFAVYNELTKVKFIAEGLRDYQFLDSGQKKQIVTQLFKEKRKVTEKDIIQFLHNVDGYDGIELKGIEKQFNASLSTYHDLLKIIKDKAFMDDAKNEAILENIVHTLTIFEDREMIKQRLAQYDSLFDEKVIKALTRRHYTGWGKLSAKLINGISDKQTGNTILDYLIDDGEINRNFMQLINDDGLSFKEIIQKAQVVGKTNDVKQVVQELPGSPAIKKGILQSIKIVDELVKVMGHAPESIVIEMARENQTTARGKKNSQQRYKRIEDSLKILASGLNSKILKEHPTDNIQLQNDRLFLYYLQNGKDMYTGEALDINQLSSCDIDHIIPQAFIKDDSLDNRVLTSSKDNRGKSDNVPSLEVVDKMKVFWQQLLDSKLISYRKFNNLTKAERGGLNELDKVGFIKRQLVETRQITKHVAQILDARFNKEVTEKDKKNRTVKIITLKSNLVSNFRKEFELYKVREINDYHHAHDAYLNAVVAKAILKKYPKLEPEFVYGDYQKYDLKRYISRSKDPKEIEKATEKYFFYSNLLNFFKEEVHYADGTIVKRENIEYSKDTGEIAWNKEKDFATIKKVLSLPQVNIVKKREVQTGGFSKESILPKGNSDKLIPRKTKDILWDTTKYGGFDSPVIAYSILLIADIEKGKAKKLKTVKTLVGITIMEKDAFEKNPIAFLENKGYHNVCKENILCLPKYSLFELENGRRRLLASAKELQKCNEIVLPVYLTTLLYHSKNVHKLDEPGHLEYIQKHRNEFKDLLNLVSEFSQKYVLADANLEKIKNLYADNEQADIEILANSFINLLTFTALGAPAAFKFFGKDVDRKRYTTVSEILNATLIHQSITGLYETRIDLSKLGED

SEQ ID NO: 768 - protein, 93 aa, Streptococcus sp.
MILIKDSENNEQKLFRFNSRNDTAKHYVELKPYDKARFDGQQELITILGNVAKGGQCLKGLNKSNISIFKVKTDVLGKKHIIKKEGDEPKLKF

SEQ ID NO: 769 - protein, 1121 aa, Streptococcus sp.
MNGLVLGLDIGIASVGVGILEKNSGKIIHANSRLFPAATADNNVERRKNRQARRLHRRKKHRGVRFQDLFEDYGLLTDFSKVSINLNPYRLRVDGLNQQLTNEELFIALKNIVKRRGISYLDDASEDGGTVSSDYGKAVEENRKLLAEQTPGQIQLERFEKYGQVRGDFTVVENGEKRRLINVFSTSAYRKEAERILRKQQEFNSKITDEFIEDCLKILTGKRKYYHGPGNEKSRTDYGRFRTDGTTLDNIFGILIGKCTFYPDEYRASKASYTAQEFNLLNDLNNLTVPTETKKLSEEQKKVIVEYAKEAKTLGASTLLKYIAKMIDASVDQIRGYRVDVNNKPEIHTFEAYRKMQSLETISVGELSRNVLDELAHILTLNTEREGIEEAINTKLKDSFSQDQVLELVQFRKNNSSLFSKGWHNFSLKLMMELIPELYETSEEQMTILTRLGKQKSKEISKRTKYIDEKELTEEIYNPVVAKSVRQAIKIINEATKKHGIFDNIVIEMARENNEEDAKKDYIKRQKANQDEKNAAMEKAAFQYNGKKELPDSIFHGQKELATKIRLWHQQGEKCLYTGKNIPISDLIHNQYKYEIDHILPLSLSFDDSLSNKVLVLATANQEKGQRTPFQALDSMDDAWSYREFKSYVKESKLLGNKKKEYLLTEEDISKIEVKQKFIERNLIDTRYSSRVVLNALQDFYKAHKFDTTISVVRGQFTSQLRRKWGLEKSRETYHHHAVDALIIAASSQLRLWKKQNNPLIAYKEGQFVDSETGEIISLSDDEYKELVFKAPYDHFVDTLSSKTFEDSILFSYQVDSKFNRKISDATIYATRKAKLDKEKSEETYVLGKIKDIYSQAGYDAFIKIYNKDKSKFLMYHKDPQTFEKVIEEILRTYPSKELNDKNKEIPCNPFEKYRQENGPIRKYSKKSNGPEIKSLKYYDNKLGNHIDITPESSDNQVVLQSLKPWRTDVYFNHQTKKYELMGLKYSDLSFEKGSGKYSISNQKYNSIKRIEGIDEQSEFKFTLYKNDLILIKDSENNEQKLFRFNSRNDTAKHYIELKPYDKAKFDGEQELITILGNVAKGGRCLKGLNKSNISIFKVKTDVLGKKHIIKKEGDEPKLKF

SEQ ID NO: 770 - protein, 1026 aa, Streptococcus sp.
MNGLVLGLDIGIASVGVGILEKNSGKIIHANSRLFPAATADNNVERRKNRQARRLNRRKKHRGVRFQDLFEDYGLLTDFSKVSINLNPYRLRVDGLNQQLTNEELFIALKNIVKRRGISYLDDASEDGGAVSSDYGKAVEENRKLLAEQTPGQIQLERFEKYGQVRGDFTVVENGEKRRLINVFSTSAYRKEAEKILRKQQEFNNQITDEFIEDYLKILTGKRKYYHGPGNEKSRTDYGRFRTDGTTLDNIFGVLIGKCTFYPNEYRASKSSYTAQEFNLLNDLNNLTVPTETKKLSEEQKKVIVEYAKEAKTLGASTLLKYIVKMIDASVDQISGYRVDVNNKPEMHTFEVYRKMQSLETISVGELSRNVLDELAHILTLNTEREGIEEAINSKLMGVFSQDQVLELVQFRKNNSSLFSKGWHNFSLKLMMELIPELYETSEEQMTILTRLGKQKSKETSKRTKYIDEKELTEEIYNPVVAKSVRQAIKIINEATKKHGIFDNIVIEMARENNEEDAKKDYIKRQKANQDEKNAAMEKAAFQYNGKKELPGNIFNGHKELATKIRLWHQQGEKCLYTGKTIPISDLIHNQYKYEIDHILPLSLSFDDSLSNKVLVHATANQEKGQRTPFQALDSMDDAWSYREFKSYVKDLKSLSNKKKDYLLTEEDISKIEVKQKFIERNLVDTRYSSRVVLNALQDFYKSHQFDTTISVVRGQFTSQLRRKWGLEKSRETYHHHAVDALIIAASSQLRLWKKQNNPLITYKEGQFIDSQTGEIISLTDDEYKELVFKAPYDHFVDTLHSKTFEDGILFSYQVDSKYNRKISDATIYATRKAKLDKDKSEETYVLGKIKDIYSQAGYDAFIKIYNKDKRKFLMYHKDPQTFEKVIEEILRTYPSKERNDKNKEVPCNPFEKYRQENGPIRKYSKKGNGPEIKCLKYYDNKLGNYIDISPDGSDNQVVLQSLKPWRTDVYFNHQTKKYELMGLKYSDLSFEKGSGKYSISNEKYNSIKRIEGVNEQSEFKFTLYK

SEQ ID NO: 771 - protein, 1377 aa, Streptococcus sp.
MNNKPYSIGLDIGTNSVGWSVITDDYKVPSKKMKVLGNTDKRFIKKNLIGALLFDEGTTAEARRLKRTARRRYTRRKNRLRYLQEIFAEEMSKVDSSFFHRLDDSFLIPEDKRGSKYPIFATLVEEKEYHKQFPTIYHLRKQLADSKEKADLRLIYLVLAHMIKYRGHFLYEEAFDIKNNDIQKIFNEFISIYDNTFEGSSLSGQNAQVETIFTDKISKSAKRERVLKLFPDEKSTGLFSEFLKLIVGNQADFKKHFDLEEKAPLQFSKDTYDEDLENLLEQIGDDFADLFVAAKKLYDAILLSGILTVTDPSTKAPLSASMIERYENHQKDLAVLKQFIKTNLPEKYVEVFSDQSKDGYAGYIDGKTTQEAFYKYIKNLLSKFDGADYFLDKIEREVFLRKQRTFDNGSIPHQIHLQEMNTILRRQGEHYPFLKENKEKIEKILTFRIPYHVGPLARGNRDFAWLTRNSDQAIRPWNFEEIVDKASSAEDFINKMTNYDLYLPEEKVLPKHSLLYETFAVYNELTKVKFIAEGMRDYQFLDSGQKKKIINQLFKKKRKVTEDDIIDCLQKIDNYDGIELKGIEKQFNASLSTYHDILKIIRDKEFMDDPKNGDILENVIHTLTIFEDREMIKQRLAQYNSIFDEKVIKALSRKHYTGWGKLSAKLIDGIRDKQTGKTILDYLMDDGKSNRNFMQLIKDDELSFTEIIQKAQVVGDTDNLRQVVQNLPGSPAIKKGILQSIKIVDELVKVMGHAPESIVIEMARENQTTARGKKNSQQRYKRIEDSLKNLASGLDSNILKENPTDNIQLQNDRLFLYYLQNGKDMYTGEALNINQLSSYDIDHIIPQAFIKDDSLDNRVLTSSKDNRGKSDNVPSLEVVEKMKAFWQQLLDSKLISERKYNNLTKAERERGGLNELDKVGFIKRQLVETRQITKHVAQILDARFNKEVTEKNKKNRNVKIITLKSNMVSNFRKEFGLYKVREINDYHHAHDAYLNAVVAKAILKKYPKLEPEFVYGDYQKYDLKRYISRSKDPKEVEKATEKYFFYSNLLNFFKEEVHYADGTIVKRENIEYSKDTGEIAWNKEKDFATIKKVLSLPQVNIVKKTEEQTVGQNGGLFDNNIVSKKKVVDASKLIPIKSGLSPEKYGGYARPTIAYSVLVTYKQNNKIKNTMVGIPVLTKLEFERDPNLYLRNLGINNVSHVIKLVKYTVLEFKHKYGTYRRFIVSNQELKRANQIFVTTKQMKLISQYTTLDKNEHDSLLKNNQQLIQSIWNQFLEFMLATDLVNKKQYDELILTNNQTIEECRNIMNRVITTLSFTNINAGQKKIIFDDTLSLPIKRWQFTDSDKMVKKIIESTLIHQSITGLYETRIDLSKLGED

SEQ ID NO: 772 - protein, 1371 aa, Streptococcus sp.
MNNNNYSIGLDIGTNSVGWAVITDDYKVPSKKMRVLGNTDKRFIKKNLIGALLFDEGTTAEDRRLKRTARRRYTRRKNRLRYLQEIFAEEMSKVDSSFFHRLDDSFLVPEDKSGSKYPIFATLAEEKEYHKKFPTIYHLRKHLADSKEKADLRLIYLALAHITKYRGHFLYEEAFDIKNNDIQKIFNEFINIYDNTFEGSSLSGQNAQVEAIFTGKISKSVKREHVLKLFPDEKSTGLFSEFLKLIVGNQADFKKHFDLEEKASLQFSKDTYDEDLENLLGQIGDDFADLFLVAKKLYDAILLSGILTVTDPSTKAPLSASMIERYENHQEDLAALKQFIKNNLPEKYAEVFSDQSKDGYAGYIDGKTTQEAFYKYIKNLLSKFEGADYFLDKIEREDFLRKQRTFDNGSIPHQIHLQEMNAILRRQGEHYPLLKENKEKIEKILTFRIPYYVGPLARGNRDFAWLTRNSDQAIRPWNFEEIVDKASSAESFINKMTNYDLYLPEEKVLPKHSLLYETFAVYNELTKVKFIAEGLRDYQFFDSGQKKQIVNQLFKEKRKVTEKDIIHYLHNVDGYDGIELKGIEKQFNASLSTYHDLLKIIKDKEFMDNHKNQEILENIVHTLTIFEDREMIKQRLAQYDSIFDEKVIKALTRRHYTGWGKLSAKLINGICDKKTGKTILDYLIDDGYNNRNFMQLINDDGLSFKEIIQKAQVVGKTDDLTQVVRELSGSPAIKKGILQSIKIVDELVKIMGYAPESIVIEMARENQTTAKGKKNSQQRYKRIEDALKNLAPGLDSTISKENPTDNIQLQNDRLFLYYLQNGKDMYTGEALDINQLSSYDIDHIIPQAFIKDDSLDNRVLTSSKDNRGKSDNVPSLEVVKKRKAFWQQLLDSKLISERKFNNLTKAERGGLDERDKVGFIKRQLVETRQITKHVARILDARFNTEVSEKNQKIRSVKIITLKSNLVSNFRKEFKLYKVREINDYHHAHDAYLNAVVAKAILKKYPKLEPEFVYGDYQKYDLKRYISKSKDPKEVEKATEKYFFYSNLLNFFKEEVHYADGTIVKRENIEYSKDTGEIAWNKEKDFVTIKKVLSYPQVNIVKKREVQTGGFSKESILPKGNSDKLIPRKTKDILWDTTKYGGFDSPVIAYSILLIADIEKGKAKKLKTVKTLVGITIMEKAAFEKNPITFLENKGYHNVRKENILCLPKYSLFELENGRRRLLASAKELQKGNEIVLPVYLTTLLYHSKNVHKLDEPEHLEYIQKHRYEFKDLLNLVSEFSQKYVLAEANLEKIKSLYVDNEQADIEILANSFINLLTFTALGAPAAFKFFGKDVDRKRYTTVSEILNATLIHQSITGLYETRIDLSKLGED

SEQ ID NO: 773 - protein, 1139 aa, Streptococcus sp.
MSDLVLGLDIGIGSVGVGILNKVTGEIIHKNSRIFPAAQAENNLERRTNRQGRRLTRRKKHRRVRLNHLFEESGLITDFTKVSINLNPYQLRVKGLTAELSNEELFIALKNMVKHRGISYLDDASDDGNSSVGDYAQIVKENSKQLETKTPGQIQLERYQKYGQLRGDFTVEEDGRKHRLINVFPTSAYHAEALRILQTQQEFNPQITDEFINSYLEILTGKRKYYHGPGNEKSRTDYGKYTTKKDAQGQYITLNNIFGILIGKCTFYPEEYRAAKASYTAQEFNLLNDLNNLTVPTETKKLSEEQKYQIITYVKNEKAMGPAKLFKYIAKLLSCDVADIKGYRIDKSDKAEIHTFEAYRKMKTLETLDVKKMAREELDKLAYVLTLNTEREGIQEALDHEFADGTFSQEQVDELVQFRKANSSIFGKGWHSFSVKLMMELIPELYATSEEQMTILTRLGKQKTTSSSNKTKYIDEKQLTEEIYNPVVAKSVRQAIKIVNAAIKKYGDFDNIVIEMARETNEDDEKKAIQKIQKANKAEKDAAMRKAANQYNGKAELPHSVFHGHKQLATKIRLWHQQGERCLYTGKTISIHDLINNPNQFEIDHILPLSITFDDSLANKVLVYATANQEKGQRTPYQALDSMDDAWSFRELKAFVRESKALSNKKKEYLLTEEDISKFDVRKKFIERNLVDTRYASRVVLNALQEHFRTHKIDTKVSVVRGQFTSQLRRHWGIEKTRDTYHHHAVDALIIAASSQLNLWKKQKNTLVSYSEDQLLDIETGELISDDEYKESVFKAPYQHFVDTLKSKEFEDSILFSYQVDSKFNRKISDATIYATRKAKLDKEKKEYTYTLGKIKDIYALGTKTPSKTGFYKFLDLYKKDKSQFLMYQKDRRTWDEVIEKILEQYRPFKEKDKNGKEVDFNPFEKYRIENGPIRKYSRKGNGPEIKSLKYYDNLLGRFVDITPSESKNPVALLSLNPWRTDVYYNTETRKYEFLGLKYADLCFEKGGSYGISKVKYNKIREKEGIGKNSEFKFTLYKNDLILIKDTETNRQQIFRFWSRTGKDNPKSFEKHKLELKPYEKTRFEKGEELKVLGKVPPSSNRLQKNMQIENLSIYKVRTDVLGNQHIIKNEGDKPKLDF

SEQ ID NO: 774 - protein, 1375 aa, Streptococcus sp.
MSNKSYSIGLDIGTNSVGWAVITDDYKVPSKKMKVLGNTDKHFIKKNLIGALLFDEGTTAEDRRLKRTARRRYTRRKNRLRYLQEIFSQEISKVDSSFFHRLDDFFLVPEDKRGSKYPIFATLVEEKEYHKKFPTIYHLRKHLADSKEKTDLRLIYLALAHMIKYRGHFLYEESFDIKNNDIQKIFSEFISIYDNTFEGKSLSGQNAQVEAIFTDKISKSTKRERVLKLFPDEKSTGLFSEFLKLIVGNQADFKKHFDLEEKAPLQFSKDTYDEDLENLLGQIGDDFADLFLVAKKLYDAILLSGILTVKDLSTKAPLSASMIERYENHQKDLAALKQFIQNNLQEKYDEVFSDQSKDGYAGYIDGKTTQEAFYKYIKNLLSKFEGADYFLDKIEREDFLKKQRTFDNGSIPHQIHLQEMNAIIRRQGEHYPFLQENKEKIEKILTFRIPYYVGPLARGNGDFAWLTRNSDQAIRPWNFEEIVDQASSAEDFINKMTNYDLYLPEEKVLPKHSLLYETFAVYNELTKVKFIAEGLTRYQFLDKKQKKDIFDTFFKAENKRKVTEKDIIHYLHNVDGYDGIELKGIEKQFNASLSTYHDLLKIIKDKAFMDDSKNEEILENIIHTLTIFEDREMIKQRLAQYDSLFDEKVIKALTRRHYTGWGKLSAKLINGIRDKKSGKTILDYLIDDGEINRNFMQLIHDDGLSFKEIIQKAQVFGKTNDVKQVVQELPGSPAIKKGILQSIKIVDELVKVMGHAPESIVIEMARENQTTARGKKNSQQRYKRIEDSLKNLASGLDSNILKENPTDNIQLQNDRLFLYYLQNGRDMYTGKPLEINQLSNYDIDHIIPQAFIKDDSLDNRVLTSSKDNRGKSDNVPSLEVVEKMKAFWQQLLDSKLISERKFNNLTKAERERGGLNELDKVGFIKRQLVETRQITKHVAQFLDARFNKEVTEKDKKNRNVKIITLKSNLVSNFRKEFGLYKVREINDYHHAHDAYLNAVLAKAILKKYPKLEPEFVYGDYQKYDLQRYISKSREPKEVEKATQKYFFYSNLLNFFKEEVHYADGTIVKRENIEYSKDTGEIAWNKEKDFATVKKVLSLPQVNIVKKTEVQTGGFSKESILPKGNSDKLIPRKTKEILWDTTKYGGFDSPVIAYSILLIADIEKGKAKKLKTVKTLVGITIMEKATFEKNPITFLENKGYHNVRKENILCLPKYSLFELESGRRRMLASAKELQKGNEIVLPVYLTTLLYHSKNVHKLDEPEHLEYIQKHRYEFKDLLNLVSEFSQKYVLADANLEKIKNLYADNEQADIEILANSFINLLTFTALGAPAAFKFLGKDVDRKRYTTVSEILNATLIHQSITGLYETRIDLSKLGED

SEQ ID NO: 775 - protein, 206 aa, Streptococcus sp.
RTPFQALDSMDDAWSYREFKSYVKESKLLGNKKKEYLLTEEDISKIEVKQKFIERNLIDTRYSSRVVLNALQDFYKAHKFDTTISVVRGQFTSQLRRKWGLEKSRETYHHHAVDALIIAASSQLRLWKKQNNPLIAYKEGQFVDSETGEIISLSDDEYKELVFKAPYDHFVDTLSSKTFEDSILFSYQVDSKFNRKISDATIYATR

SEQ ID NO: 776 - protein, 1122 aa, Streptococcus suis
MSNGKILGLDIGIASVGVGVIDAQTGEIIHASSRIFPSANAANNAERRTFRGSRRLIRRKKHRIKRLDDLFNDFHINLDGEMSTDNPYVLRVKGLSQKLTVEELYISIKNIMKRRGISYLDDAESDNEAGRSDYAKAIERNRQLLTSKTPGEIQLERLEKYGQLRGNFTIIDEEGQSQQIINVFSTSDYVKEVEKILDCQKMYHKFISDEFCDKLIELLREKRKYYVGPGNEKSRTDYGIYRTDGTTLENLFGILIGKCTFYPDQYRSSRASYTAQEFNFLNDLNNLTVPTETKKLSQEQKEFLVNYAKETSVLGAGKILQQIAKLADCKVEDIRGYRLDNKDKPELHTFETYRAMKGLVPLVDIGVLSREQLDILADILTLNTDFEGIREALKKQLPNVFDEKQVKGLASFRKSKSQLFAKGWHNLSQKIMLEVIPELYATSDEQMTILTRLGKFEKSSVAEYPSSINVDEITDEIYNPVVAKSIRQTIKIINASIKKWDEFDQIVIEMPRDRNEDEEKKRIADGQKANAKEKADSILRAAELYCAGKVLPDYVYNGHNQLATKIRLWYQQGERCIYTGQPISIHDLIHNQNQYEIDHILPLSLTFDDSLSNKVLVLATANQEKAQRTPYNYLKSATSAWSYREFKDYVTKRKGIGKKKCEYLTFEEDINGFEVRSKFIQRNLVDTRYASKVILNALQDYFKISGIQTKVSVVRGQFTSQLRHKWGIEKTRETYHHHAVDALIIAASSQLRLWKKQESPLVVDYQEGRQVDLETGEILELTDEQYKELVYQPPYQGFVNTISSSAFDNEILFSYQVDSKVNRKISDATIYATRNAQLGKDKTEGIYVLGKIKDIYTQAGYEAFLKRYTKDKTSFLMYHKDLDTWEKVIEIILRDYREYDEKGKEIGNPFERYRRENGYVKKYSRKGNGTAIKSLKYYDNKLGNHIDITPENSRNAVVLQSLKPWRTDVYFNKETGKYEFLGIKYSDLSFEKGTGEYGISQEKYDSIKIAEGVAKKSIFKFTLYKQDLLFIKDIENNFGKLLRFTSKNDTSKHYVELKPYDKNKFGTEEPLLPVLGNVAKSGQCIKGLNKSNISIYKVRTDILGYRHFIKQEGEHPQLKFKK

SEQ ID NO: 777 - protein, 1381 aa, Streptococcus suis
MVKKKYAIGIDIGTNSVGWSIVTDDYKVPSKKMKVFGNTEKRYIKKNLLGTLLFDEGNTAENRRLKRTARRRYTRRRNRILYLQEIFAEEINKIDDSFFQRLDDSFLIVEDKQGSKHPIFGTLQEEKEYHKQFPTIYHLRKQLADSSQKADIRLIYLALAHIIKYRGHFLFEGDLKSENKDVQHLFNDFVEMFDKTVEGSYLSENLPNVADVLVEKVSKSRRLENILHYFPNEKKNGLFGNFLALALGLQPNFKTNFELAEDAKIQFSKETYEEDLEELLGKIGDDYADLFIATKSLYDGILLAGILSTTDSTTKAPLSSSMVNRYEEHQKDLALLKNFIHQNLSDSYKEVFNDKLKDGYAGYIEGKTTQENFYRFIKKAIEKIEGSNYFIDKIDREDFLRKQRTFDNGSIPHQIHLQEMHAIIRRQAEFYPFLVENQDKIEKILTFRIPYYVGPLARGKSEFAWLNRKSDEKIRPWNFDEMVDKETSAENFITRMTNYDRYLPDQKVLPKHSLLYEKFAVYNELTKVKFIAEGMRDYQFLDSGQKKDIVKTLFKTKRKVTAKDIKAYLENSNGYAGVELKGLEEQFNASLPTYHDLLKILRDKAFIDAEENQEILEDIVLTLTLFEDREMIRKRLEKYKDILTEEQRKKLERRHYTGWGRLSAKLINGILDKVTRKTILGYLIDDGTSNRNFMQLINDDTLSFVDEIRLAQGSGEAEDYRAEVQNLAGSPAIKKGILQSLKIVDELIEVMGYEPEHIVVEMARENQFTNQGRRNSQQRINRLENALKDFGSKILEEQKPYGVSKVNNIHLQSDRLFLYYLQNGKDMYTDEELDIDHLSEYDIDHIIPQAFIKDDSLDNKVLTKSAKNRGKSDDVPSMEIVHNRKNFWRQLLKSKLISQRKFDNLTKAERGGLTNEDKARFIQRQLVETRQITKHVARMLDTRFNTKLDEAGNRIRDPKVNIITLKSNLVSQFRKDYQLYKIREINNYHHAHDAYINAVVATALLKKYPQLAPEFVYGEYPTYNSYNSRKSATEKVLFYSNIMNFFKRIVVHSKTGEVRIRPVIEVNKETGEIVWDKKSDFRTVRKVLSYPQVNVVKKTEVQNHGLDRGKPKGFYNANLSPRPKEGSVENLVPAKQSFDTKRYGGYAGISNSYAVLVNGIIEKGKKKSKAEVTEFQGISILARKDFDKNPKQYLLNLGYKDIKSIIKLPKYSLFELENGSRRMLASILSTNNKRGEIHKGNEMYLPDKFVTLLYHAMRVNRTLEPGHKKYVETHRHVFDELLIYILEYNEKIVGAKANGKRIVEAYSARKDTDNLEELCNSFINLLNLTALGSAVDFEFLGTKIPRYRDYTPSSLLKATLIHQSVTGLYETRIDLSKLGGD

SEQ ID NO: 778 - protein, 39 aa, Streptococcus thermophilus
GRCIKGLGKSNISIYKVRTDVLGNQHIIKNEGDKPKLDF

SEQ ID NO: 779 - protein, 302 aa, Streptococcus thermophilus
MIRRKKHRIVRLNRLFEESGLITDFTKISINLNPYQLRVKGLTDELSNEELFIALKNMVKHRGISYLDDASDDGNSSVGDYAQIVKENSKQLETKTPGQIQLERYQTYGQLRGDFTVEKDGKKHRLINVFPTSAYRSEALRILQTQQEFNPQITDEFINRYLEILTGKRKYYHGPGNEKSRTDYGRYRTSGETLDNIFGILIGKCTFYPDEFRAAKASYTAQEFNLLNDLNNLTVPTETKKLSKEQKNQIINYVKNEKAMGPAKLFKYIAKLLSCDVADIKGYRIDKSGKAERFILSKPIEK

SEQ ID NO: 780 - protein, 1121 aa, Streptococcus thermophilus
MSDLVLGLDIGIGSVGVGILNKVTGEIIHKNSRIFPAAQAENNLVRRTNRQGRRLTRRKKHRIVRLNRLFEESGLITDFTKISINLNPYQLRVKGLTDELSNEELFIALKNMVKHRGISYLDDASDDGNSSVGDYAQIVKENSKQLETKTPGQIQLERYQTYGQLRGDFTVEKDGKKHRLINVFPTSAYRSEALRILQTQQEFNPQITDEFINRYLEILTGKRKYYHGPGNEKSRTDYGRYRTSGETLDNIFGILIGKCTFYPDEFRAAKASYTAQEFNLLNDLNNLTVPTETKKLSKEQKNQIINYVKNEKAMGPAKLFKYIAKLLSCDVADIKGYRIDKSGKAEIHTFEAYRKMKTLETLDIEQMDRETLDKLAYVLTLNTEREGIQEALEHEFADGSFSQKQVDELVQFRKANSSIFGKGWHNFSVKLMMELIPELYETSEEQMTILTRLGKQKTTSSSNKTKYIDEKLLTEEIYNPVVAKSVRQAIKIVNAAIKEYGDFDNIVIEMARETNEDDEKKAIQKIQKANKDEKDAAMLKAANQYNGKAELPHSVFHGHKQLATKIRLWHQQGERCLYTGKTISIHDLINNSNQFEVDHILPLSITFDDSLANKVLVYATANQEKGQRTPYQALDSMDDAWSFRELKAFVRESKTLSNKKKEYLLTEEDISKFDVRKKFIERNLVDTRYASRVVLNALQEHFRAHKIDTKVSVVRGQFTSQLRRHWGIEKTRDTYHHHAVDALIIAASSQLNLWKKQKNTLVSYSEDQLLDIETGELISDDEYKESVFKAPYQHFVDTLKSKEFEDSILFSYQVDSKFNRKISDATIYATRQAKVGKDKADETYVLGKIKDIYTQDGYDAFMKIYKKDKSKFLMYRHDPQTFEKVIEPILENYPNKQMNEKGKEVPCNPFLKYKEEHGYIRKYSKKGNGPEIKSLKYYDSKLGNHIDITPKDSNNKVVLQSVSPWRADIYFNNTTGKYEILGLKYADLQFEKGTGTYKISQEKYNDIKKKEGVDSDSEFKFTLYKNDLLLVKETETKEQQLFRFLSRTMPKQKHYVELKPYDKQKFEGGEALIKVLGNVANGGQCIKGLGKSNISIYKVRTDVLGNQHIIKNEGDKPKLDF

SEQ ID NO: 781 - protein, 1121 aa, Streptococcus thermophilus
MSDLVLGLDIGIGSVGVGILNKVTGEIIHKNSRIFPAAQAENNLVRRTNRQGRRLTRRKKHRIVRLNRLFEESGLITDFTKISINLNPYQLRVKGLTDELSNEELFIALKNMVKHRGISYLDDASDDGNSSVGDYAQIVKENSKQLETKTPGQIQLERYQTYGQLRGDFTVEKDGKKHRLINVFPTSAYRSEALRILQTQQEFNPQITDEFINRYLEILTGKRKYYHGPGNEKSRTDYGRYRTSGETLDNIFGILIGKCTFYPDEFRAAKASYTAQEFNLLNDLNNLTVPTETKKLSKEQKNQIINYVKNEKAMGPAKLFKYIAKLLSCDVADIKEYRIDKSGKAEIHTFEAYRKMKTLETLDIEQMDRETLDKLAYVLTLNTEREGIQEALEHEFADGSFSQKQVDELVQFRKANSSIFGKGWHNFSVKLMMELIPELYETSEEQMTILTRLGKQKTTSSSNKTKYIDEKLLTEEIYNPVVAKSVRQAIKIVNAAIKEYGDFDNIVIEMARETNEDDEKKAIQKIQKANKDEKDAAMLKAANQYNGKAELPHSVFHGHKQLATKIRLWHQQGERCLYTGKTISIHDLINNSNQFEVDHILPLSITFDDSLANKVLVYATANQEKGQRTPYQALDSMDDAWSFRELKAFVRESKTLSNKKKEYLLTEEDISKFDVRKKFIERNLVDTRYASRVVLNALQEHFRAHKIDTKVSVVRGQFTSQLRRHWGIEKTRDTYHHHAVDALIIAASIQLNLWKKQKNTLVSYSEDQLLDIETGELISDDEYKESVFKAPYQHFVDTLKSKEFEDSILFSYQVDSKFNRKISDATIYATRQAKVGKDKADETYVLGKIKDIYTQDGYDAFMKIYKKDKSKFLMYRHDPQTFEKVIEPILENYPNKQINEKGKEVPVNPFLKYKEEHGYIRKYSKKGNGPEIKSLKYYDSKLGNHIDITPKDSNNKVVLQSVSPWRADVYFNKTTGKYEILGLKYADLQFEKGTGTYKISQEKYNDIKKKEGVDSDSEFKFTLYKNDLLLVKDTETKEQQLFRFLSRTMPKQKHYVELKPYDKQKFEGGEALIKVLGNVANSGQCKKGLGKSNISIYKVRTDVLGNQHIIKNEGDKPKLDF

SEQ ID NO: 782 - protein, 1121 aa, Streptococcus thermophilus
MSDLVLGLDIGIGSVGVGILNKVTGEIIHKNSRIFPAAQAENNLVRRTNRQGRRLTRRKKHRRVRLNRLFEESGLITDFTKISINLNPYQLRVKGLTDELSNEELFIALKNMVKHRGISYLDDASDDGNSSVGDYAQIVKENSKQLETKTPGQIQLERYQTYGQLRGDFTVEKDGKKHRLINVFPTSAYRSEALRILQTQQEFNPQITDEFVNRYLEILTGKRKYYHGPGNEKSRTDYGRYRTNGETLDNIFGILIGKCTFYPEEFRAAKASYTAQEFNLLNDLNNLTVPTETKKLSKEQKNQIINYVKNEKAMGPAKLFKYIAKLLSCDVADIKGYRIDKSGKAEIHTFEAYRKMKTLETLDIEQMDRETLDKLAYVLTLNTEREGIQEALEHEFADGSFSQKQVDELVQFRKANSSIFGKGWHNFSVKLMMELIPELYETSEEQMTILKRLGKQKTTSSSNKTKYIDEKLLTEEIYNPVVAKSIRQAIKIVNAAIKEYGDFDNIVIEMARETNEDDEKKAIQKIQKANKDEKDAAMLKAANQYNGKAELPHSVFHGHKQLATKIRLWHQQGERCLYTGKTISIHDLINNPNQFEVDHILPLSITFDDSLANKVLVYATANQEKGQRTPYQALDSMDDAWSFRELKAFVRESKTLSNKKKEYLLTEEDISKFDVRKKFIERNLVDTRYASRVVLNALQEHFRAHKIDTKVSVVRGQFTSQLRRHWGIEKTRDTYHHHAVDALIIAASSQLNLWKKQKNTLVSYSEDQLLDIETGELISDDEYKESVFKAPYQHFVDTLKSKEFEDSILFSYQVDSKFNRKISDATIYATRQAKVGKDKKDETYVLGKIKDIYTQDGYDAFMKIYKKDKSKFLMYRHDPQTFEKVIEPILENYPNKEMNEKGKEVPCNPFLKYKEEHGYIRKYSKKGNDPEIKSLKYYDSKLGNHIDITPKDSNNKVVLQSVSPWRADVYFNKTTGKYEILGLKYADLQFEKGTGTYKISQEKYNDIKKKEGVDSDSEFKFTLYKNDLLLVKDTETKEQQLFRFLSRTMPKQKHYVELKPYDKQKFEGGEALIKVLGNVANSGQCKKGLGKSNISIYKVRTDVLGNQHIIKNEGDKPKLDF

SEQ ID NO: 783 - protein, 1122 aa, Streptococcus thermophilus
MSDLVLGLDIGIGSVGVGILNKVTGEIIHKNSRIFPAAQAENNVERRTNRQGRRLTRRKKHRRVRLNRLFEESGLITDFTKISINLNPYQLRVRGLTDELSNEELFIALKNMVKHRGISYLDDASDDGNSSVGDYAQIVKENSKQLETKTPGQIQLERYQTYGQLRGDFTVEKDGKKHRLINVFPTSAYRSEALRILQTQQEFNSQITDEFINRYLEILTGKRKYYHGPGNEKSRTDYGRYRTSGETLDNIFGILIGKCTFYPEEFRAAKASYTAQEFNLLNDLNNLTVPTETKKLSKEQKNQIINYVKNEKAMGPAKLFKYIAKLLSCDVADIKGYRIDKSGKAEIHTFEAYRKMKTLETLDIEQMDRETLDKLAYVLTLNTEREGIQEALEHEFADGSFSQKQVDELVQFRKASSSIFGKGWHNFSVKLMMELIPELYETSEEQMTILTRLGKQKTTSSSNKTKYIDEKLLTEEIYNPVVAKSVRQAIKIVNAAIKEYGDFDNIVIEMARETNEDDEKKAIQKIQKANKDEKDAAMLKAANQYNGKAELPHSVFHGHKQLATKIRLWHQQGERCLYTGKTISIHDLINNPNQFEVDHILPLSITFDDSLANKVLVYATANQEKGQRTPYQALDSMDDAWSFRELKAFVRESKTLSNKKKEYLLTEEDISKFDVRKKFIERNLVDTRYASRVVLNALQEHFRAHKIDTKVSVVRGQFTSQLRRHWGIEKTRDTYHHHAVDALIIAASSQLNLWKKQKNTLVSYSEDQLLDIETGELISDDEYKESVFKAPYQHFVDTLKSKEFEDSILFSYQVDSKFNRKLSDATIYATRQAKVGKDKKDETYVLGKIKDIYTQDGYDAFMKIYKKDKSKFLMYRHDPQTFEKVIEPILENYPNKEMNEKGKEVPCNPFLKYKEEHGYIRKYSKKGNGPEIKSLKYYDSKLLGNPIDITPENSKNKVVLQSLKPWRADVYFNKTTGKYEILGLKYADLQFEKKTGTYKISQEKYNGIMKEEGVDSDSEFKFTLYKNDLLLVKDTETKEQQLFRFLSRTMPNVKYYVELKPYSKDKFEKNESLIEILGSADKSGRCIKGLGKSNISIYKVRTDVLGNQHIIKNEGDKPKLDF

SEQ ID NO: 784 - protein, 1388 aa, Streptococcus thermophilus
MTKPYSIGLDIGTNSVGWAVITDNYKVPSKKMKVLGNTSKKYIKKNLLGVLLFDSGITAEGRRLKRTARRRYTRRRNRILYLQEIFSTEMATLDDAFFQRLDDSFLVPDDKRDSKYPIFGNLVEEKAYHDEFPTIYHLRKYLADSTKKADLRLVYLALAHMIKYRGHFLIEGEFNSKNNDIQKNFQDFLDTYNAIFESDLSLENSKQLEEIVKDKISKLEKKDRILKLFPGEKNSGIFSEFLKLIVGNQADFRKCFNLDEKASLHFSKESYDEDLETLLGYIGDDYSDVFLKAKKLYDAILLSGFLTVTDNETEAPLSSAMIKRYNEHKEDLALLKEYIRNISLKTYNEVFKDDTKNGYAGYIDGKTNQEDFYVYLKNLLAEFEGADYFLEKIDREDFLRKQRTFDNGSIPYQIHLQEMRAILDKQAKFYPFLAKNKERIEKILTFRIPYYVGPLARGNSDFAWSIRKRNEKITPWNFEDVIDKESSAEAFINRMTSFDLYLPEEKVLPKHSLLYETFNVYNELTKVRFIAESMRDYQFLDSKQKKDIVRLYFKDKRKVTDKDIIEYLHAIYGYDGIELKGIEKQFNSSLSTYHDLLNIINDKEFLDDSSNEAIIEEIIHTLTIFEDREMIKQRLSKFENIFDKSVLKKLSRRHYTGWGKLSAKLINGIRDEKSGNTILDYLIDDGISNRNFMQLIHDDALSFKKKIQKAQIIGDEDKGNIKEVVKSLPGSPAIKKGILQSIKIVDELVKVMGGRKPESIVVEMARENQYTNQGKSNSQQRLKRLEKSLKELGSKILKENIPAKLSKIDNNALQNDRLYLYYLQNGKDMYTGDDLDIDRLSNYDIDHIIPQAFLKDNSIDNKVLVSSASNRGKSDDFPSLEVVKKRKTFWYQLLKSKLISQRKFDNLTKAERGGLLPEDKAGFIQRQLVETRQITKHVARLLDEKFNNKKDENNRAVRTVKIITLKSTLVSQFRKDFELYKVCEINDFHHAHDAYLNAVIASALLKKYPKLEPEFVYGDYPKYNSFRERKSATEKVYFYSNIMNIFKKSISLADGRVIERPLIEVNEETGESVWNKESDLATVRRVLSYPQVNVVKKVEEQNHGLDRGKPKGLFNANLSSKPKPNSNENLVGAKEYLDPKKYGGYAGISNSFAVLVKGTIEKGAKKKITNVLEFQGISILDRINYRKDKLNFLLEKGYKDIELIIELPKYSLFELSDGSRRMLASILSTNNKRGEIHKGNQIFLSQKFVKLLYHAKRISNTINENHRKYVENHKKEFEELFYYILEFNENYVGAKKNGKLLNSAFQSWQNHSIDELCSSFIGPTGSERKGLFELTSRGSAADFEFLGVKIPRYRDYTPSSLLKDATLIHQSVTGLYETRIDLAKLGEG

SEQ ID NO: 785 - protein, 1388 aa, Streptococcus thermophilus
MTKPYSIGLDIGTNSVGWAVITDNYKVPSKKMKVLGNTSKKYIKKNLLGVLLFDSGITAEGRRLKRTARRRYTRRRNRILYLQEIFSTEMATLDDAFFQRLDDSFLVPDDKRDSKYPIFGNLVEEKAYHDEFPTIYHLRKYLADSTKKADLRLVYLALAHMIKYRGHFLIEGEFNSKNNDIQKNFQDFLDTYNAIFESDLSLENSKQLEEIVKDKISKLEKKDRILKLFPGEKNSGIFSEFLKLIVGNQADFRKCFNLDEKASLHFSKESYDEDLETLLGYIGDDYSDVFLKAKKLYDAILLSGFLTVTDNETEAPLSSAMIKRYNEHKEDLALLKEYIRNISLKTYNEVFKDDTKNGYAGYIDGKTNQEDFYVYLKNLLAEFEGADYFLEKIDREDFLRKQRTFDNGSIPYQIHLQEMRAILDKQAKFYPFLAKNKERIEKILTFRIPYYVGPLARGNSDFAWSIRKRNEKITPWNFEDVIDKESSAEAFINRMTSFDLYLPEEKVLPKHSLLYETFNVYNELTKVRFIAESMRDYQFLDSKQKKDIVRLYFKDKRKVTDKDIIEYLHAIYGYDGIELKGIEKQFNSSLSTYHDLLNIINDKEFLDDSSNEAIIEEIIHTLTIFEDREMIKQRLSKFENIFDKSVLKKLSRRHYTGWGKLSAKLINGIRDEKSGNTILDYLIDDGISNRNFMQLIHDDALSFKKKIQKAQIIGDEDKGNIKEVVKSLPGSPAIKKGILQSIKIVDELVKVMGGRKPESIVVEMARENQYTNQGKSNSQQRLKRLEKSLKELGSKILKENIPAKLSKIDNNALQNDRLYLYYLQNGKDMYTGDDLDIDRLSNYDIDHIIPQAFLKDNSIDNKVLVSSASNRGKSDDFPSLEVVKKRKTFWYQLLKSKLISQRKFDNLTKAERGGLLPEDKAGFIQRQLVETRQITKHVARLLDEKFNNKKDENNRAVRTVKIITLKSTLVSQFRKDFELYKVREINDFHHAHDAYLNAVIASALLKKYPKLEPEFVYGDYPKYNSFRERKSATEKVYFYSNIMNIFKKSISLADGRVIERPLIEVNEETGESVWNKESDLATVRRVLSYPQVNVVKKVEEQNHGLDRGKPKGLFNANLSSKPKPNSNENLVGAKEYLDPKKYGGYAGISNSFAVLVKGTIEKGAKKKITNVLEFQGISILDRINYRKDKLNFLLEKGYKDIELIIELPKYSLFELSDGSRRMLASILSTNNKRGEIHKGNQIFLSQKFVKLLYHAKRISNTINENHRKYVENHKKEFEELFYYILEFNENYVGAKKNGKLLNSAFQSWQNHSIDELCSSFIGPTGSERKGLFELTSRGSAADFEFLGVKIPRYRDYTPSSLLKDATLIHQSVTGLYETRIDLAKLGEG

SEQ ID NO: 786 - protein, 595 aa, Streptococcus thermophilus
MVQFRKANSSIFGKGWHNFSVKLMMELIPELYETSEEQMTILKRLGKQKTTSSSNKTKYIDEKLLTEEIYNPVVAKSVRQAIKIVNAAIKEYGDFDNIVIEMARETNEDDEKKAIQKIQKANKDEKDAAMLKAANQYNGKAELPHSVFHGHKQLATKIRLWHQQGERCLYTGKTISIHDLINNPNQFEVDHILPLSITFDDSLANKVLVYATANQEKGQRTPYQALDSMDDAWSFRELKAFVRESKTLSNKKKEYLLTEEDISKFDVRKKFIERNLVDTRYASRVVLNALQEHFRAHKIDTKVSVVRGQFTSQLRRHWGIEKTRDTYHHHAVDALIIAASSQLNLWKKQKNTLVSYSEDQFLDIETGELISDDEYKESVFKAPYQHFVDTLKSKEFEDSILFSYQVDSKFNRKISDATIYATRKAKLDKEKKEYTYTLGKIKDIYTQAGYDAFIKIYKKDKSKFLMYHHDPQTFEKVIEPILENYPNKEINEKGKEVPCNPFLKYKEEHGYIRKYSKKGNGPEIKSFKYYDNLLGRHIDITPKNSKNIVALRKLNPWRTDVYFNHETMKYEFLGLKYADISYKKSKNKAGDFLPK

SEQ ID NO: 787 - protein, 1388 aa, Streptococcus thermophilus]
MTKPYSIGLDIGTNSVGWAVITDNYKVPSKKMKVLGNTSKKYIKKNLLGVLLFDSGITAEGRRLKRTARRRYTRRRNRILYLQEIFSTEMATLDDAFFQRLDDSFLVPDDKRDSKYPIFGNLVEEKVYHDEFPTIYHLRKYLADSTKKADLRLVYLALAHMIKYRGHFLIEGEFNSKNNDIQKNFQDFLDTYNAIFESDLSLENSKQLEEIVKDKISKLEKKDRILKLFPGEKNSGIFSEFLKLIVGNQADFRKCFNLDEKASLHFSKESYDEDLETLLGYIGDDYSDVFLKAKKLYDAILLSGFLTVTDNETEAPLSSAMIKRYNEHKEDLALLKEYIRNISLKTYNEVFKDDTKNGYAGYIDGKTNQEDFYVYLKNLLAEFEGADYFLEKIDREDFLRKQRTFDNGSIPYQIHLQEMRAILDKQAKFYPFLAKNKERIEKILTFRIPYYVGPLARGNSDFAWSIRKRNEKITPWNFEDVIDKESSAEAFINRMTSFDLYLPEEKVLPKHSLLYETFNVYNELTKVRFIAESMRDYQFLDSKQKKDIVRLYFKDKRKVTDKDIIEYLHAIYGYDGIELKGIEKQFNSSLSTYHDLLNIINDKEFLDDSSNEAIIEEIIHTLTIFEDREMIKQRLSKFENIFDKSVLKKLSRRHYTGWGKLSAKLINGIRDEKSGNTILDYLIDDGISNRNFMQLIHDDALSFKKKIQKAQIIGDEDKGNIKEVVKSLPGSPAIKKGILQSIKIVDELVKVMGGRKPESIVVEMARENQYTNQGKSNSQQRLKRLEKSLKELGSKILKENIPAKLSKIDNNALQNDRLYLYYLQNGKDMYTGDDLDIDRLSNYDIDHIIPQAFLKDNSIDNKVLVSSASNRGKSDDFPSLEVVKKRKTFWYQLLKSKLISQRKFDNLTKAERGGLLPEDKAGFIQRQLVETRQITKHVARLLDEKFNNKKDENNRAVRTVKIITLKSTLVSQFRKDFELYKVREINDFHHAHDAYLNAVIASALLKKYPKLEPEFVYGDYPKYNSFRERKSATEKVYFYSNIMNIFKKSISLADGRVIERPLIEVNEETGESVWNKESDLATVRRVLSYPQVNVVKKVEEQNHGLDRGKPKGLFNANLSSKPKPNSNENLVGAKEYLDPKKYGGYAGISNSFAVLVKGTIEKGAKKKITNVLEFQGISILDRINYRKDKLNFLLEKGYKDIELIIELPKYSLFELSDGSRRMLASILSTNNKRGEIHKGNQIFLSQKFVKLLYHAKRISNTINENHRKYVENHKKEFEELFYYILEFNENYVGAKKNGKLLNSAFQSWQNHSIDELCSSFIGPTGSERKGLFELTSRGSAADFEFLGVKIPRYRDYTPSSLLKDATLIHQSVTGLYETRIDLAKLGEG

SEQ ID NO: 788 - protein, 1038 aa, Streptococcus vestibularis
MIDELSNEELFIALKNMVKHRGISYLDDASDDGNSSVGDYAQIVKENSKQLETKTPGQIQLERYQKYGQLRGDFTVEEDGKKHRLINVFPTSAYRAEALRILQTQQEFNSQITDEFINRYLEILTGKRKYYHGPGNEKSRTDYGRYRTSGETLDNIFGILIGKCTFYPEEFRAAKASYTAQEFNLLNDLNNLTVPTETKKLSEEQKNQIINYVKNEKAMGPAKLFKYIAKLLSCDIADIKGYRIDKSDKAEIHTFEAYRKMKTLETIDIEKMSREELDKLAYVLTLNTEREGIQEALEHEFVDGNFSQEQIDELVQFRKANSSIFGKGWHNFSVKLMMELIPELYATSEEQMTILTRLGKQKTTSSSNKTKYIDEKLLTEEIYNPVVAKSVRQAIKIVNAAIKEYGDFDNIVIEMARATNEDDEKKAIQKIQKANKDEKDAAMLKAANQYNGKAELPHSVFHGHKQLATKIRLWHQQGERCLYTGKTISIHDLINNPNQFEIDHILPLSITFDDSLANKVLVYATANQEKGQRTPYQALDSMDDAWSFRELKAFVRESKTLSNKKKEYLLTEEDISKFDVRKKFIERNLVDTRYASRVVLNALQEHFRAHKIDTKVSVVRGQFTSQLRRHWGIEKTRDTYHHHAVDALIIAASSQLNLWKKQKNTLVNYSENQLLDIETGELISDDEYKESVFKAPYQHFVDTLKSKEFEDSILFSYQVDSKFNRKISDATIYATRKAKLDKEKKEYTYTLGKIKDIYALGTKTPSKTGFYKFLDLYKKNKSQFLMYQKDRKTWDEVIEKILEQYRPFKEKDKNGKEVDFNPFEKYRIENGPIRKYSRKGNGPEIKSLKYYDNLLGRFVDITPSESKNPVALLSLNPWRTDVYYNTETRKYEFLGLKYADLCFEKGGSYGISKVKYNKIREKEGIGKNSEFKFTLYKNDLILIKDTETNRQQVFRFWSRTGKDNPKRFEKHKIELKPYEKARFEKGEELEVLGKVPPSSNQLQKNMQIENLSIFKVRTDVLGNQHIIKNEGDKPKLDF

SEQ ID NO: 789 - protein, 97 aa, Streptococcus vestibularis
MSDLVLGLDIGIGSVGVGILNKVTGEIIHKNSRIFPAAQAENNVERRTNRQGRRLTRRKKHRRVRLNHLFEESGLITDFTKVSINLNPYQLRVKIDR

SEQ ID NO: 790 - protein, 1084 aa, Subdoligranulum sp.
MKNTLYGIGLDIGVASVGWAVVGLNGTGEPVGLHRLGVRIFDKAEQPKTGESLAAPRRMARGMRRRLRRKALRRADVYALLERSGLSTREELAQMFEAGGLEDIYALRTRALDEPVGKAEFSRILLHLAQRRGFKSNRRTASDGEDGRLLAAVNENRRRMAQGGWRTVGEMLYRHEAFALHKRNKADDYLSTVGRDMVAEEASILFERQRAMGCSWAAPELQAEYLSILLRQRSFDEGPGGNSPYGGNQVEKMVGRCTFEPDEPRAAKAAYSFEYFSLLQKLNHIRLAENGETRPLTQPQRQQLLSLAHKTPDISLARIRKELALPETVQFNGVRCRANETLEESEKKEKFACLPAYHKMRKALDGVVKGRISSLSISQRDAAATALSLYKNEDTLRAKLTEAGFQAPEIDALAGLTGFSKFGHLSLKACRKLIPHLEQGLTYDQACTAAGYDFKGHGAGERAFTLPAAAPEMEQITSPVVRRAVAQTIKVVNGIIREMDASPAWVRIELARELSKTFGERQEMDRSMRENAAQNERLMQELRDTFHLLSPTGQDLVKYRLWKEQDGVCAYSLRRLDVERLFEPGYVDVDHIVPYSLSFDDRRSNKVLVLSSENRQKGNRLPLQYLQGKRREDFIVWTNSSVHDYRKRQNLLREKLSGDEAEGFRQRNLQDTQHMARFLYNYISDHLAFAQSEALGKKRVFAVSGAVTSHLRKRWGLSKVRADGDLHHALDAAVVACTTDGMIRRISGYYGHIEGEYLQDADGAGSQHARTKERFPAPWPRFRDELIVRLSEQPAEPLLDINPEFYCEYGTEHIRPVFVSRMPRRKVTGPGHKETIKGAAAADEGLLTVRKALTELKLDKDGEIKDYYMPSSDTLLYEALKAQLRRFGGDGKKAFAEPFYKPKADGTPGPLVRKVKTTEKATLTVPVHGGAASNDTMVRVDVFLVPGDGYYWVPVYTADTLKPELPNRAVVQGKPYSEWKEMREEDFIFSLYPNDLVYVEHKSGLKFTLQNADSTLEKTRTQTSAFAYFVSGSISTASITIRTHDNAYGIPSLGVKTLKTFHKYQVDVLGNVFPVHKETRQKFR

SEQ ID NO: 791 - protein, 951 aa, Sutterella parvirubra
MPTVRPVFHSSASFDLGAKNTGLFLVNHPAGAAPSAEYAAAYTIVQPADGDGLNYSTTNRRAVRHRLRGGKRFKLARRLVLQVIDALRKLKPGLIRDEEMRRTVEALSSLLKRRGFTRIESEAQVDPTTLDSVDPAVFADHETLGGFFSLGIPISTQWDALSQNPGAVEQLFKALPSAKDFGKYVTEQFPEFAEQKKLYADAIKVLSSEAKSIVMQLGLGHHHRSKYFEMIAHDMLRDPRLQGVFELFGSEERFKTFICNVSNLQLRALRWYFDEPNPEVANQWNPEKFQVVWLRGLKYFHPDAERKADMKKLIDELTASKDILDALCTTDPRRTIPPYEDQNNRRPPFDQTLWLSAAELTRRYGDKWRIWSQKFERADRALSTGLDEILLYTDRRSRMFNRNQDPSVYADSYVLQRVLDRSSKLDRYALRALAAGYRTQELHEPLATLSDTLGTQHVETFLTFAAEYYEEVAAAKNGLWLDGPSRLLERADIHPPMKKKVLDLLLGNILDATPEIGRILRTVLWNRHVHEKSRSTPASLCRSIEAIRKDFGGEFRMRYDALDAKIRAAEDQKKKFKPTNAEEKDLFKAWNATKTMHAFLRDVLQLTPKQLERTASPYVFAQLHTLIDTERDGFTSTSLAAHLENHWRMRANAAGMAQCSRLPADAVRPFDGVLSKALDRQAFEAAKLAAQHLMSRKELTDTDIRYSIIIESNRFAFSASTAELKKNTLAKKNAEKGLNFELKRWQDKDSRIREASRGICAYTGAKLGDVVEYDHIIPRAFTTSAMGSVFNSEANLICVSRPGNQTKADKRYGLNKLHKTYLTAVFGTADVTTIAASIEDIVGKLASANRLRHFELLNEKEQDAVRHALFLDDESDARRIVLRELAAQNKSRVNGTQAWFVRAFMTKLLEITKDWRERTGNTLDIRSWKTDAEVASRLRSALNFHAEITLT

SEQ ID NO: 792 - protein, 406 aa, Sutterella parvirubra
SNLFREEVPYGDHFLPIIQMKNRIYIGYQLPKADGTGGNAVAVLGKDPLELLETLKPFLDREPQAFSDHPVTYKMINERAYELLTKCALTPDQTTELERTQAEVLRSLNYQTSRAAVLGRLVDDKNKFVAKDAVWKEKDFVISFKLSPKKSAFKASGQLELPAKSDWKALVDSPELAINWGQPADDTFSQRIERKVRMNSSHLEHTPKKRVVSLPVVDKPSGGFRIRRHNLDGSAVFQVHTVANNKYGGFSADSAGKVDWSTPVLCGHLQHANLVPLDPETASAEQLVRMSEWRVVETTSDIRLEVCPGTSGRRYVRVELPFTLLQEWLTAGKVADVPVSPLHLPGSIKLTDPKTFCAEAQKTLSIFAQPRATIFFEQLGDRVRFRFEASGGPATMNAAYNAAGRS

SEQ ID NO: 793 - protein, 389 aa, Sutterella wadsworthensis
MKACDLEEKTNHLQACVAIDLGARYTGTFSILHKSSHLPSKDDCRAATYVLPEDGGKMTYSQRNRTAVRHRIRGKKRFALARRMAMLIIREKLAAKSVTLTSSETRRLAEAVGSLLRRRGYNRLETETDNDLTVLENIEPEVFSEHEILGKYFYAGTDLAIQWETLSQDLSKISSLLAERLSEKDFKKYLTGLIPDDKNKIKHIISVFKMLIDEAESINMQCVLGHKHRTQYLSDIHADMHRDTRLSKAAEAFGGVDRLWRLLGNLSNLQLRAHRWYFNAPHLFDDQALEPARLQKTLVRAFKYLHCPQGVESRAQAELVKELEEADDIIDALCTIDPVRTIPPYENQQNRRPPFDQTLYLSPDLGVSGFLCLGRLFQGQPNEAALCFL

SEQ ID NO: 794 - protein, 976 aa, Tannerella sp.
MKKILGLDLGSNSIGWALVNEAENRDEASSIIKLGVRVNPLTVDEMQNFEKGKSITTNADRTLKRSMRRNLQRYKLRRDALIKLLKKVGFITDGTILSEQGNRTTFETYRLRAKAPDEEISLQELARVLLMINKKRGYKSSRKIKEKEAGTLIDGMEVAKKLYDEDLTPGQLCLQLLESGKKSLPDFYSSDLQEEFDRIWNFQKQFNPKAFCDTAKEEIKGKNKSQTWAILAKYFIWMEEMDVWNEKESKTERVEKECKLVGLKRTVKKEEQRKENYCWRVQALTEQLDLEKVAVVLQEINGQISTSSGYLGAISDRSKVLYFNRQTVGQYQMAELEKNPNTSLRNMVFYRQDYLDEFDKIWEKQAEFHKELTVELKKEIRDIIIFYQRRLKSQKGLIGFCEFENREIMVEKNGKMQAKVVGCKVIPRSHPLFQEFKIWQTLNNVEVFAGEKKCKRKRTDAFPGLFDGTEDTLMVEGWRYLYQEEKEILAKELSVKKSLKKEYILKLLFDNPQDLDMNFEQIEGNDTGNVLFSAYSKMIEKYGYEPLDFGKPTDKIIEQLQVIFADLGWNTDLLFVDLNKEGKDLEKQPYFKLWHLLYSFEGDNTPTGNGKLVEKLMELCHVGKECALELVNISFQNDYGSLSAKAIKKILPYLKEGNRYDVACGYAGYRHSKSSLTKEEIENKVLKDKLDILPKNSLRNPVVEKILNQMVNVINAIIDTYGKPDEIRVELARELKKSAKEREELTKAIAKSTREHEEIRKVLQEEFGMINVSRNDIIRYKLYKELKDNGYKTLYSNQDIPKEKVFSKEIDIEHIIPQARLFDDSLSNKTLEYKAINIEKGNKTAYDFVKEKYGEKGLQQYLNRCESLFKGHRTKLRKLKMGQENIPEGFIDRDLRNTQYIAKKALAMLNEICRRVVATTGSITDRLREDWQLVDVLKELRCFRYFKDTKMKANHNKNIFYTSIKVDVSDTSKILK

SEQ ID NO: 795 - protein, 1049 aa, Tistrella mobilis
MINERLTFGIDLGIGSCGWAVLRHADAAGEPGVIEGLGSWCFDVPETSKERIPTNQVRRSNRLLRRVIRRRRNRMAEIRRLFHAQGLLPSADEDALKRPRLDPWELRARGLDQCLSAEEFAVALGHIARHRGFRSSAKRKAANTSGEDSKMLSALLVTRERTARYRTVGEMFARDPEYSARRRNRDGIFDRTVARDDLIHEVGKLFEAQRARGSAFASPDLEADFNAIAFRQAEMQDSERLVGNCPFERDEKRAARWAPSFERFRLLTRLINLRIATAEGERRFTPEDLARVSAELGATAKLPVSRVRALIGLLPDERFTTIRVEDEDRDIVARTGEAAPGTWRLRKTLGEALWAEMQARPDQLDAIAHVLSFFEATAKIRSELDRLGLPAAVIEALDRGLEDGAFAKFKGAGHISAKACRNLLPHLQQGHRYDQACRLAGYDHAASTLSHTAQVVSKAGFNALVTELGESIANPIARKALTEGLKQIRAMCARWGLPGAIHIELAREVGNSIEKRRELESQRETTTKRRQTERDEIRGLLALEDVDDDTLLRYRLWKEQGGKCLYTGKDIHVRQLIATDNSVQVDHILPWSRFGDDSFNNKTLCLASANQRKRGQTPWEWFSLTGTPEAWEVFASRVETSKDLRGFKKRNLLLKNADEVAQRFRSRNLNDTRYAARLLAEAAKLFYPAGDRQEKDGRRRVLTRPGPLTAALRHAWGLESLKKADGKRVSDDRHHALDALAVAAISEREVQRLTRSFQEWEQQGLARPLRHVAPPWPGFRGDVLAAYAQAFVARPERRRARGKGHDASIRQVVGEGPEAQVFERRGLADLKEADLDRVKDPERNQAIIEAVRAWILAGRPADAPPRSPRGDVIVKLRTAPAKKIKPAVPVRGGTADRGDMVRIDVFTRPNRKGRDEWYLVPIYPHQVMNRKAWPHPPMRSVVAYKDEAGWTEIGAEHSFRFSLYPRSYVQLVKSNGDVIEGYLVSMDRSTGAFRVFVHNNPAEMAKGIGAKTLLNLRKFNVDRFGVRTEVKSEVRTWHGEVCTSPVPPD

SEQ ID NO: 796 - protein, 1395 aa, Treponema denticola
MKKEIKDYFLGLDVGTGSVGWAVTDTDYKLLKANRKDLWGMRCFETAETAEVRRLHRGARRRIERRKKRIKLLQELFSQEIAKIDEGFFQRMKESPFYAEDKTILQENALFNDKDFTDKTYHKAYPTINHLIKAWIENKVKPDPRLLYLACHNIIKKRGHFLFEGDFDSENQFDTSIQALFEYLREDMEVDIDADSQKVKEILKDSSLKNSEKQSRLNKILGLKPSDKQKKAITNLISGNKINFADLYDNPDLKDAEKNSISFSKDDFDALSDDLASILGDSFELLLKAKAVYNCSVLSKVIGDEQYLSFAKVKIYEKHKTDLTKLKAVIKKHFPNNYKKVFGYNQDNESKNNYSGYVGVCKTKNKKLVINNSVNQEDFYKFLKPILSAKSEIKEVNDILAEIETGNFLPKQISKSNAEIPYQLRKMELEKILSNAEKHFSFLKQKDEKGLSHSEKIIMLLTFKIPYYIGPINDNHKKSFPDRCWVVKKEKSPSGKTTPWNFFDHIDKEKTAEEFITSRTNFCTYLIGESVLPKNSLLYSEYTVLNEINNLQIIIDGKNICDTKLKQKIYEDLFKKYKKITQKQISTFIKHEGICNKTDEVIILGIDKECTSSLKSYIELKNIFGKQVDEISTKNMLEEIIRWATIYDEGEGKTILKTKIKAEYGKYCSDEQIKKILNLKFSGWGRLSRKFLETVTSEMPGFSEPVNIITAMRETQNNLMELLSSEFKFTENIKKINSGFEDAEKQFSYDGLVKPLFLSPSVKKMLWQTLKLVKEISHITQAPPKKIFIEMAKGAELEPARTKTRLKILQDLYSSCKNDADAFSSEIQYLSGKIENEDNLRLRSDKLYLYYTQLGKCMYCGKPIEIGHVFDTSNYDIDHIYPQSKIKDDSISNRVLVCSSCNKNKEDKYPLKSEIQSKQRGFWNFLQRNNFISLEKLNRLTRTTPISDDETAKFIARQLVETRQATKVAAKVLEKMFPETKIVYSKAETVSMFRNKFDIIKCREINDFHHAHDAYLNIVVGNVYNTKFTNNPWNFIKEKRDNPKIADTYNYYKVFDYDVKRNNITAWEKGKTIITVKDMLKRNTPIYTRQAACKKGGLFDQTIMKKGLGQHPLKKEGPFSNISKYGGYNKVSAAYYTLIEYEEKGNKIRSLETIPLYLVKDIQKDQDVLKSYLTDLLGKKEFKILVPKIKINSLLKINGFPCHITGKTNDSFLLRPAVQFCCSNDEVLYFKKIIRFSEIRSQREKIGKTISPYEDLSFRSYIKENLCKKTKNDEIGEKEFYDLLQKKNLEIYDMLLTKHKDTIYKKRPNSATIDILVKGKEKFKSLIIENQFEVILEILKLFSATRNVSELQHIGGSKYSGVAKIGNKISSLDNCILIYQSITGIFEKRIDLLKV

SEQ ID NO: 797 - protein, 769 aa, Treponema denticola
MKKEIKDYFLGLDVGTGSVGWAVTDTDYKLLKANRKDLWGMRCFETAETAEVRRLHRGARRRIERRKKRIKLLQELFSQEIAKIDEGFFQRMKESPFYAEDKTILQENALFNDKDFTDKTYHKAYPTINHLIKAWIENKVKPDPRLLYLACHNIIKKRGHFLFEGDFDSENQFDTSIQALFEYLREDMEVDIDADSQKVKEILKDSSLKNSEKQSRLNKILGLKPSDKQKKAITNLISGNKINFADLYDNPDLKDAEKNSISFSKDDFDALSDDLASILGDSFELLLKAKAVYNCSVLSKVIGDEQYLSFAKVKIYEKHKTDLTKLKAVIKKHFPNNYKKVFGYNQDNESKNNYSGYVGVCKTKNKKLVINNSVNQEDFYKFLKPILSAKSEIKEVNDILAEIETGNFLPKQISKSNAEIPYQLRKMELEKILSNAEKHFSFLKQKDEKGLSHSEKIIMLLTFKIPYYIGPINDNHKKSFPDRCWVVKKEKSPSGKTTPWNFFDHIDKEKTAEEFITSRTNFCTYLIGESVLPKNSLLYSEYTVLNEINNLQIIIDGKNICDTKLKQKIYEDLFKKYKKITQKQISTFIKHEGICNKTDEVIILGIDKECTSSLKSYIELKNIFGKQVDEISTKNMLEEIIRWATIYDEGEGKTILKTKIKAEYGKYCSDEQIKKILNLKFSGWGRLSRKFLETVTSEMPGFSEPVNIITAMRETQNNLMELLSSEFKFTENIKKINSGFEDAEKQFSYDGLVKPLFLSPSVKKCCGRL

SEQ ID NO: 798 - protein, 1395 aa, Treponema denticola
MKKEIKDYFLGLDVGTGSVGWAVTDTDYKLLKANRKDLWGMRCFETAETAEVRRLHRGARRRIERRKKRIKLLQELFSQEIAKIDEGFFQRMKESPFYAEDKTILQENALFNDKDFTDKTYHKAYPTINHLIKAWIENKVKPDPRLLYLACHNIIKKRGHFLFEGDFDSENQFDTSIQALFEYLREDMEVDIDADSQKVKEILKDSSLKNSEKQSRLNKILGLKPSDKQKKAITNLISGNKINFADLYDNPDLKDAEKNSISFSKDDFDALSDDLASILGDSFELLLKAKAVYNCSVLSKVIGDEQYLSFAKVKIYEKHKTDLTKLKAVIKKHFPNNYKKVFGYNQDNESKNNYSGYVGVCKTKNKKLVINNSVNQEDFYKFLKPILSAKSEIKEVNDILAEIETGNFLPKQISKSNAEIPYQLRKMELEKILSNAEKHFSFLKQKDEKGLSHSEKIIMLLTFKIPYYIGPINDNHKKSFPDRCWVVKKEKSPSGKTTPWNFFDHIDKEKTAEEFITSRTNFCTYLIGESVLPKNSLLYSEYTVLNEINNLQIIIDGKNICDTKLKQKIYEDLFKKYKKITQKQISTFIKHEGICNKTDEVIILGIDKECTSSLKSYIELKNIFGKQVDEISTKNMLEEIIRWATIYDEGEGKTILKTKIKAEYGKYCSDEQIKKILNLKFSGWGRLSRKFLETVTSEMPGFSEPVNIITAMRETQNNLMELLSSEFKFTENIKKINSGFEDAEKQFSYDGLVKPLFLSPSVKKMLWQTLKLVKEISHITQAPPKKIFIEMAKGAELEPARTKTRLKILQDLYSSCKNDADAFSSEIQYLSGKIENEDNLRLRSDKLYLYYTQLGKCMYCGKPIEIGHVFDTSNYDIDHIYPQSKIKDDSISNRVLVCSSCNKNKEDKYPLKSEIQSKQRGFWNFLQRNNFISLEKLNRLTRTTPISDDETAKFIARQLVETRQATKVAAKVLEKMFPETKIVYSKAETVSMFRNKFDIIKCREINDFHHAHDAYLNIVVGNVYNTKFTNNPWNFIKEKRDNPKIADTYNYYKVFDYDVKRNNITAWEKGKTIITVKDMLKRNTPIYTRQAACKKGELFNQTIMKKGLGQHPLKKEGPFSNISKYGGYNKVSAAYYTLIEYEEKVNKIRSLETIPLYLVKDIQKDQDVLKSYLTDLLGKKEIKILVPKIKINSLLKINGFPCHITGKTGDSFVLRPAVQFCCSNDEVLYFKKIIRFNEIRSQREKMGKTISPYEDLSFRSYIKENLCKKTKADEIGEKEFYDLLQKKNLEIYDMLLTKHKDTIYNKRPNSTTLGMLTKGRYEFINLKPKDQIIVMLEILKLFCTTREAIDLGLIKGKPAAGVATLGKKISNLDNCILIYQSITGIFEKRIDLLKV

SEQ ID NO: 799 - protein, 1395 aa, Treponema denticola
MKKEIKDYFLGLDVGTGSVGWAVTDTDYKLLKANRKDLWGMRCFETAETAEVRRLHRGARRRIERRKKRIKLLQELFSQEIAKIDEGFFQRMKESPFYAEDKTILQENTLFNDKDFTDKTYHKAYPTINHLIKAWIENKVKPDPRLLYLACHNIIKKRGHFLFEGDFDSENQFDTSIQALFEYLREDMEVDIDADSQKVKEILKDSSLKNSEKQSRLNKILGLKPSDKQKKAITNLISGNKINFADLYDNPDLKDAEKNSISFSKDDFDALSDDLASILGDSFELLLKAKAVYNCSVLSKVIGDEQYLSFAKVKIYEKHKTDLTKLKNVIKKHFPKDYKKVFGYNKNEKNNNNYSGYVGVCKTKSKKLIINNSVNQEDFYKFLKTILSAKSEIKEVNDILTEIETGTFLPKQISKSNAEIPYQLRKMELEKILSNAEKHFSFLKQKDEKGLSHSEKIIMLLTFKIPYYIGPINDNHKKSFPDRCWVIKKEKSPSGKTTPWNFFDHIDKDKTAEAFITSRTNFCTYLVGESVLPKSSLLYSEYTVLNEINNLQIIIDGKNICDIKLKQKIYEELFKKYKKITQKQISTFIKHEGICNKTDEVIILGIDKECTSSLKSYIELKNIFGKQVDEISTKNMLEEIIRWATIYDEGEGKTILKTKIKAEYGKYCSDEQIKKILNLKFSGWGRLSRKFLETVTSEMPGFSEPVNIITAMRETQNNLMELLSSEFKFTENIKKINSGFEDAEKQFSYNGLVKPLFLSPSVKKMLWQTLKLVKEISHITQAPPKKIFIEMAKGAELEPARTKTRLKILQDLYNNCKNDADAFSSEIKDLSGKIENEDNLRLRSDKLYLYYTQLGKCMYCGKPIEIGHVFDTSNYDIDHIYPQSKIKDDSISNRVLVCSSCNKNKEDKYPLKSEIQSKQRGFWNFLQRNNFISLEKLNRLTRTTPISDDETAKFIARQLVETRQATKVAAKVLEKMFPETKIVYSKAETVSMFRNKFDIIKCREINDFHHAHDAYLNIVVGNVYNTKFTNNPWNFIKEKRDNPKIADTYNYYKVFDYDVKRNNITAWEKGKTIITVKDMLKRNTPIYTRQAACKKGGLFDQTIMKKGLGQHPLKKEGAFSNISKYGGYNKVSAAYYTLIEYEEKGNKIRSLETIPLYLVKDIQKDQDVLKSYLTDLLGKKEIKILVPKIKINSLLKINGFPCHITGKTGDSFVLRPAVQFCCSNDEVLYFKKIIRFNEIRSQREKMGKTISPYEDLSFRSYIKENLCKKTKADEIGEKEFYDLLQKKNLEIYDMLLTKHKDTIYNKRPNSTTLGMLTKGRYEFINLKPKDQIIVMLEILKLFCTTREAIDLGLIKGKPAAGVATLGKKISNPDNCILIYQSITGIFEKRIDLLKV

SEQ ID NO: 800 - protein, 1395 aa, Treponema denticola
MKKEIKDYFLGLDVGTGSVGWAVTDTDYKLLKANRKDLWGMRCFETAETAEVRRLHRGARRRIERRKKRIKLLQELFSQEIAKIDEGFFQRMKESPLYAEDKTILQENTLFNDKDFTDKTYHKAYPTINHLIKAWIENKVKPDPRLLYLACHNIIKKRGHFLFEGDFDSENQFDTSIQALFEYLREDMELDIDADSQKVKEILKDSSLKNSEKQSRLNKMLGLKPSDKQKKAITNLISGNKINFADLYDNPDLKDAEKNSISFSKDDFDALSDDLASILGDSFELLLKAKAVYNCSVLSKVIGDEQYLSFAKVKIYEKHKTDLTKLKNVIKKHFPKDYKKVFGYNKNEKNNNNYSAYVGVCKITHKKLVIKNSASQEDFYKFLKTILSAKSEIKEVNDILTEIETGTFLPKQISKSNAEIPYQLRKMELEKILSNAEKHFSFLKQKDEKGLSHSEKIIMLLTFKIPYYIGPINDNHKKSFPDRCWVVKKEKSPSGKTTPWNFFDHIDKEKTAEEFITSRTNFCTYLIGESVLPKSSLLYSEYTVLNEINNLQIIIDGKNICDIKLKQKIYEELFKKYKKITQKQISTFIKHEGICNKTDEVIILGIDKECTSSLKSYIELKNIFGKQVDEISTKNMLEEIIRWATIYDEGEGKTILKTKIKAEYGKYCSDEQIKKILNLKFSGWGRLSRKFLETVTSEMPGFSEPVNIITAMRETQNNLMELLSSEFKFTENIKKINSGFEDAEKQFSYNGLVKPLFLSPSVKKMLWQTLKLVKEISHITQAPPKKIFIEMAKGAELEPARTKTRLKILQDLYSSCKNDADAFSSEIQYLSGKIENEDNLRLRSDKLYLYYTQLGKCMYCGKPIEIGHVFDTSNYDIDHIYPQSKIKDDSISNRVLVCSSCNKNKEDKYPLKAEIQSKQRGFWNFLQRNNFISLEKLNRLTRTSPISDDETAKFIARQLVETRQATKVAAKVLEKMFPETKIVYSKAETVSMFRNKFDIIKCREINDFHHAHDAYLNIVVGNVYNTKFTNNPWNFIKEKRDNPKIADTYNYYKVFDYDVKRNNITAWEKGKTIITVKDMLKRNTPIYTRQAACKKGELFNQTIMKKGLGQHPLKKEGPLSNISKYGGYNKVSAAYYTLIEYEEKGSKIRSLETIPLYLVKDIQKNKDGLKSYLTDQIGKKEIKILIPKIKINSLLKINGFPCHITGKMGEAFVLRPAVQFCCSNDEALYFKKIIRFNEIRKQREKMGKTISPYEDLSFRSYIKDNLCKKTKADEIEEKEFYDLLQKKNLEIYDMLLTKHKDTIYKKRPNSATIDILVKGKEKFKSLIIENQFEVILEILKLFSATRNVSDLQHIGGSKNAGNARVGNKISSLDNCILIYQSITGIFEKRIDLLKI

SEQ ID NO: 801 - protein, 1395 aa, Treponema denticola
MKKEIKDYFLGLDVGTGSVGWAVTDTDYKLLKANRKDLWGMRCFETAETAEVRRLHRGARRRIERRKKRIKLLQELFSQEIAKIDEGFFQRMKESPLYAEDKTILQENTLFNDKDFTDKTYHKAYPTINHLIKAWIENKVKPDPRLLYLACHNIIKKRGHFLFEGDFDSENQFDTSIQALFEYLREDMEVDIDADSQKVKEILKDSSLKNSEKQSRLNKMLGLKPSDKQKKAITNLISGNKINFADLYDNPDLKDAEKNSISFSKDDFDALSDDLASILGDSFELLLKAKAVYNCSVLSKVIGDEQYLSFAKVKIYEKHKTDLTKLKNVIKKHFPKDYKKVFGYNKNEKNNNNYSGYVGVCKTKSKKLIINNSVNQEDFYKFLKTILSAKSEIKEVNDILTEIETGTFLPKQISKSNAEIPYQLRKMELEKILSNAEKHFSFLKQKDEKGLSHSEKIIMLLTFKIPYYIGPINDNHKKSFPDRCWVVKKEKSPSGKTTPWNFFDHIDKEKTAEEFITSRTNFCTYLIGESVLPKNSLLYSEYTVLNEINNLQIIIDGKNICDTKLKQKIYEELFKKYKKITQKQISTFIKHEGICNKTDEVIILGIDKECTSSLKSYIELKNIFGKQVDEISTKNMLEEIIRWATIYDEGEGKTILKTKIKAEYGKYCSDEQIKKILNLKFSGWGRLSRKFLETVTSEMPGFSEPVNIITAMRETQNNLMELLSSEFKFTENIKKINSGFEDVEKQFSYDGLVKPLFLSPSVKKMLWQTLKLVKEISHITQAPPKKIFIEMAKGAELDPVRTKTRLKILQDLYNNCKNDADAFSSEIKDLSGKIENEDNLRLRSDKLYLYYTQLGKCMYCGKPIEIGHVFDTSNYDIDHIYPQSKIKDDSISNRVLVCSSCNKNKEDKYPLKAEIQSKQRGFWNFLQRNNFISLEKFNRLTRATPISDDETAKFIARQLVETRQATKVAARVLEKMFPETKIVYSKAETVSMFRNKFDIVKCREINDFHHAHDAYLNIVVGNVYNTKFTNNLWNFIKEKRDNPKIADTYNYYKVFDYDVKRNNITAWEKGKTIITVKDMLKRNTPIYTRQAACKKGGLFDQTIMKKGLGQHPLKKEGPFSNISKYGGYNKVSAAYYTLIEYEEKGNKIRSLETIPLYLVKDIQKDQDVLKSYLTDLLGKKEFKILVPKIKINSLLKINGFPCHITGKTNDSFLLRPAVQFCCSNDEVLYFKKIIRFSEIRSQREKIGKTISPYEDLSFRSYIKENLCKKTKNDEIGEKEFYDLLQKKNLEIYDMLLTKHKDTIYKKRPNSATIDILVKGKEKFKSLIIENQFEVILEILKLFSATRNVSDLQHIGGSKYSGVAKIGNKISSLDNCILIYQSITGIFEKRIDLLKV

SEQ ID NO: 802 - protein, 357 aa, Treponema denticola
MKKEIKDYFLGLDVGTGSVGWAVTDTDYKLLKANRKDLWGMRCFETAETAEVRRLHRGARRRIERRKKRIKLLQELFSQEIAKTDEGFFQRMKESPFYAEDKTILQENALFNDRDFTDKTYHKAYPTINHLIKAWIENKVKPDPRLLYLACHNIIKKRGHFLFEGDFDSENQFDTSIQAFFEYLREDMEVDIDADSQKIKEILKDSSLKNSEKQSRLNKILGLKSSDKQKKAITNLISGNKINFADLYDNPDLKDAEKNSISFSKDDFDALSDDLASILGDSFELLLKAKAVYNCSVLSKVIGDEQYLSFAKVKIYEKHKTDLTKLKNVIKKHFPKDYKKVFGYNKNEKITTITPDM

SEQ ID NO: 803 - protein, 1395 aa, Treponema denticola
MKKEIKDYFLGLDVGTGSVGWAVTDTDYKLLKANRKDLWGMRCFETAETAEVRRLHRGARRRIERRKKRIKLLQELFSQEIAKTDEGFFQRMKESPFYAEDKTILQENALFNDRDFTDKTYHKAYPTINHLIKAWIENKVKPDPRLLYLACHNIIKKRGHFLFEGDFDSENQFDTSIQALFEYLREDMEVDIDADSQKVKEILKDSSLKNSEKQSRLNKMLGLKPSDKQKKAITNLISGNKINFADLYDNPDLKDAEKNSISFSKDDFDALSDDLASILGDSFELLLKAKAVYNCSVLSKVIGDEQYLSFAKVKIYEKHKTDLTKLKNVIKKHFPNDYKKVFGYNKNEKNNNNYSAYVGVCKTKSKKLVINNTVNQEDFYKFLKPILLAKSEIKEVNDILTEIETGTFLPKQISKSNAEIPYQLRKMELEKILSNAEKHFSFLKQKDEKGLSHSEKIIMLLTFKIPYYIGPINDNHKKSFPDRCWVIKKEKSPSGKTTPWNFFDHIDKDKTAEAFITSRTNFCTYLVGESVLPKNSLLYSEYTVLNEINNLQIIIDGKNICDIKLKQKIYEELFKKYKKITQKQISTFIKHEGICNKTDEVIILGIDKECTSSLKSYIELKNIFGKQVDEISTKNMLEEIIRWATIYDEGEGKTILKTKIKAEYGKYCSDEQIKKILNLKFSGWGRLSRKFLETVTSEMPGFSEPVNIITAMRETQNNLMELLSSEFKFTENIKKINSGFEDVEKQFSYDSLVKPLFLSPSVKKMLWQTLKLVKEISHITQAPPKKIFIEMAKGAELDPVRTKTRLKILQDLYNNCKNDADAFSSEIKDLSGKIENEDNLRLRSDKLYLYYTQLGKCMYCGKPIEIGHVFDTSNYDIDHIYPQSKIKDDSISNRVLVCSSCNKNKEDKYPLKAEIQSKQRGFWNFLQRNNFISLEKLNRLTRTSPISDDETAKFIARQLVETRQATKVAAKVLEKMFPETKIVYSKAETVSMFRNKFDIIKCREINDFHHAHDAYLNIVVGNVYNTKFTNNPWNFIKEKRDNPKIADTYNYYKVFDYDVKRNNITAWEKGKTIITVKDMLKRNTPIYTRQAACKKGELFNQTIMKKGLGQHPLKKEGPLSNISKYGGYNKVSAAYYTLIEYEEKGSKIRSLETIPLYLVKDIQKNKDGLKSYLTDQIGKKEIKILIPKIKINSLLKINGFPCHITGKMGEAFVLRPAVQFCCSNDEALYFKKIIRFNEIRKQREKMGKTISPYEDLSFRSYIKDNLCKKTKADEIEEKEFYDLLQKKNLEIYDMLLTKHKDTIYKKRPNSATIDILVKGKEKFKSLIIENQFEVILEILKLFSATRNVSDLQHIGGSKNAGNARVGNKISSLDNCILIYQSITGIFEKRIDLLKI

SEQ ID NO: 804 - protein, 631 aa, Treponema denticola
MLWQTLKLVKEISHITQAPPKKIFIEMAKGAELEPARTKTRLKILQDLYNNCKNDADAFSSEIKDLSGKIENEDNLRLRSDKLYLYYTQLGKCMYCGKPIEIGHVFDTSNYDIDHIYPQSKIKDDSISNRVLVCSSCNKNKEDKYPLRSEIQSKQRGFWNFLQRNNFISLEKLNRLTRTTPISDDETAKFIARQLVETRQATKVAAKVLEKMFPETKIVYSKAETVSMFRNKFDIVKCREINDFHHAHDAYLNIVVGNIYNTKFTNNPWNFIKEKRDNPKIADTYNYYKVFDYDVKRNNITAWEKGKTIITVKDMLKRNTPIYTRQAACKKGGLFDQTIMKKGLGQHPLKKEGPFSNISKYGGYNKVSAAYYTLIEYEEKENKIRSLETIPLYLVKDIQKSQEKLKSYLTDLLGKKEIKILVPKIKINSLLKINGFPCHITGKTNDSFLLRPAVQFCCSNDEVLYFKKIIRFNEIRSQREKMGKTISPYEDLSFRSYIKENLCKKTKNDEIGEKEFYDLLQKKNLEIYDMLLTKHKDTIYNKRPNSTTLGMLTKGRYEFINLKPKDQIIVMLEILKLFCTTREAIDLGLIKGKPAAGVATLGKKISNLDNCILIYQSITGIFEKRIDLLKV

SEQ ID NO: 805 - protein, 631 aa, Treponema denticola
MLWQTLKLVKEISHITQAPPKKIFIEMAKGAELEPARTKTRLKILQDLYSSCKNDADAFSSEIQYLSGKIENEDNLRLRSDKLYLYYTQLGKCMYCGKPIEIGHVFDTSNYDIDHIYPQSKIKDDSISNRVLVCSSCNKNKEDKYPLKSEIQSKQRGFWNFLQRNNFISLEKLNRLTRTTPISDDETAKFIARQLVETRQATKVAAKVLEKMFPETKIVYSKAETVSMFRNKFDIIKCREINDFHHAHDAYLNIVVGNVYNTKFTNNPWNFIKEKRDNPKIADTYNYYKVFDYDVKRNNITAWEKGKTIITVKDMLKRNTPIYTRQAACKKGELFNQTIMKKGLGQHPLKKEGPFSNISKYGGYNKVSAAYYTLIEYEEKVNKIRSLETIPLYLVKDIQKDQDVLKSYLTDLLGKKEIKILVPKIKINSLLKINGFPCHITGKTGDSFVLRPAVQFCCSNDEVLYFKKIIRFNEIRSQREKMGKTISPYEDLSFRSYIKENLCKKTKADEIGEKEFYDLLQKKNLEIYDMLLTKHKDTIYNKRPNSTTLGMLTKGRYEFINLKPKDQIIVMLEILKLFCTTREAIDLGLIKGKPAAGVATLGKKISNLDNCILIYQSITGIFEKRIDLLKV

SEQ ID NO: 806 - protein, 370 aa, Treponema denticola
MTEIETGTFLPKQISKSNAEIPYQLRKMELEKILSNAEKHFSFLKQKDEKGLSHSEKIIMLLTFKIPYYIGPINDNHKKSFPDRCWVVKKEKSPSGKTTPWNFFDHIDKEKTAEEFITSRTNFCTYLVGESVLPKSSLLYSEYTVLNEINNLQIIIDGKNICDIKLKQKIYEELFKKYKKITQKQISTFIKHEGICNKTDEVIILGIDKECTSSLKSYIELKNIFGKQVDEISTKNMLEDIIRWAAIYDEGEGKTILKTKIKAEYGKYCSDEQIKKILNLKFSGWGRLSRKFLETVTSEMPGFSEPVNIITAMRETQNNLMELLSSEFKFTENIKKINSGFEDVEKQFSYDGLVKPLFLSPSVKKCCGRL

SEQ ID NO: 807 - protein, 591 aa, Treponema phagedenis
MARGKEAEKGRTSSRYASIKALYENCKQDLADYDAVLEQFKSEEPLRLRSDKLYLYYTQLGRCMYTGRVIDIDRLMSDNSAYDIDHIYPRSKIKDDSLTNRVLVVKDANQDKRDEPLSPQIQDKQKGFWDFLKHNNFISIEKYERLTYRGYFTEEMLSGFIARQLVETRQGTKTAGQILEQLYPDSTVVYCKAANTSEFRQKFNLIKCREINDLHHAHDAYLNIAVGNVYYTKFTSNPRNFMKLKEPYNLRELFDRDVERNNTIAWVKNKTITTIKDMLKRNTPLYTRYAYCKTGGFFDQNIMKKGKGQFPLKENSPLSDISKYGGYNKVSGAYFILVQKKEKDAVVRILETVPLYLLNKPGKESENVREYLSTALGTKDFKILIPKIKINSLFKINGFLVHITGKTNDRFLVRSAVQFFCDDNLTLFFKRIIAFNGLRNLNKDKSMTAYDDNTMRVYVRGNLFKDKNQLFDKNKFNEIVKGKNISVYKDMVKRYETSIYKFRPNTAVIPILKSGEDKFINLPIEEQFKILQEILKLFGAINGTANLTLIGGRPSTGEMKISNNISNLKQCILIHQSPTGVFEQQIDLLKI

SEQ ID NO: 808 - protein, 1062 aa, Treponema sp.
MIMKLEKWRLGLDLGTNSIGWSVFSLDKDNSVQDLIDMGVRIFSDGRDPKTKEPLAVARRTARSQRKLIYRRKLRRKQVFKFLQEQGLFPKTKEECMTLKSLNPYELRIKALDEKLEPYELGRALFNLAVRRGFKSNRKDGSREEVSEKKSPDEIKTQADMQTHLEKAIKENGCRTITEFLYKNQGENGGIRFAPGRMTYYPTRKMYEEEFNLIRSKQEKYYPQVDWDDIYKAIFYQRPLKPQQRGYCIYENDKERTFKAMPCSQKLRILQDIGNLAYYEGGSKKRVELNDNQDKVLYELLNSKDKVTFDQMRKALCLADSNSFNLEENRDFLIGNPTAVKMRSKNRFGKLWDEIPLEEQDLIIETIITADEDDAVYEVIKKYDLTQEQRDFIVKNTILQSGTSMLCKEVSEKLVKRLEEIADLKYHEAVESLGYKFADQTVEKYDLLPYYGKVLPGSTMEIDLSAPETNPEKHYGKISNPTVHVALNQTRVVVNALIKEYGKPSQIAIELSRDLKNNVEKKAEIARKQNQRAKENIAINDTISALYHTAFPGKSFYPNRNDRMKYRLWSELGLGNKCIYCGKGISGAELFTKEIEIEHILPFSRTLLDAESNLTVAHSSCNAFKAERSPFEAFGTNPSGYSWQEIIQRANQLKNTSKKNKFSPNAMDSFEKDSSFIARQLSDNQYIAKAALRYLKCLVENPSDVWTTNGSMTKLLRDKWEMDSILCRKFTEKEVALLGLKPEQIGNYKKNRFDHRHHAIDAVVIGLTDRSMVQKLATKNSHKGNRIEIPEFPILRSDLIEKVKNIVVSFKPDHGAEGKLSKETLLGKIKLHGKETFVCRENIVSLSEKNLDDIVDEKIKSKVKDYVAKHKGQKIEAVLSDFSKENGIKKVRCVNRVQTPIEITSGKISRYLSPEDYFAAVIWEIPGEKKTFKAQYIRRNEVEKNSKGLNVVKPAVLENGKPHPAAKQVCLLHKDDYLEFSDKGKMYFCRIAGYAATNNKLDIRPVYAVSYCADWINSTNETMLTGYWKPTPTQNWVSVNVLFDKQKARLVTVSPIGRVFRK

SEQ ID NO: 809 - protein, 281 aa, Treponema vincentii
MKTLGLDIGTNSIGWGIVDETANKIEDCGVYIFPEGVKKEKGNESSKAAERTSFRLARRLKFRRKLRKCETLKVLIKNKMCPLTMEELEKWRKQKIYPVSQDFLNWYRTDELKNWEPYFLRKKCAEQKAGPYEIGRALYHLAQRRGFLSNRKESTKASDGKVSKSIDELSSLMDGRTLGQYFYELKQSGEKVRGKYTSRKEHYEKEFNKICEVQEISPELKDDLYRAIFFQRKLKSQKFLVGKCTFERNKPRAPISHFEFEEFRMLSFINSIKIAKKLRRR

SEQ ID NO: 810 - protein, 675 aa, uncultured bacterium
MTAENYSNVRFAFDIGTNSIGWAVFQLNDKQEATSILNAGARIFSDGRDPKTFEPLAVRRRNVRSASRMRDRYLRRRKRTLDKLIGYGLLPEDKAERDKILLETNDKPSGSTDKKTDPYSLRARALEEKLPLAYVARALFHIGQRRGFKSNRKADRKSNEKGKIAAGIEELSGLMHQSHAPTLGAYLAKRREEGHVVRLRASSEALTNKAYAFYPERAMLEDEFHKIWQAQAEYYPDVLTKEREEELFHVMFFQRPLKEQKVGLCTLVEGELRLPKSDPLFQQFRLYKEINELAIILPDLSQRKLTMEERDTLITLMRPAKTKTFAALRKALKIPAGGRFNKETENRKQLTGDEVYSVFSKPELFGGDWAKFSIEQQREIIDQLNNEENPDKLEEWLKNKFPKLSDEQRSEIINANLPDGYGRFGITATSKILEQLKKDVISEAEAAHRCGFDHSLANRNWKGLDELPRYQEVLERHIVPGTGDKNDIYDIYKGRLTNPTVHIGLNQVRRLTNRLIKAYGKPWQIVVELARDLPMSSEERKEHNKTLNDNIKAGFERTQKLERLGQKDNANNRLLLKLWEELGKDPDDRKSIYSGTRITEPMLFSGEVEIDHILPFSLTYDDSYANKILCLREENRIKRNRAPADVTEWKDRYDEIIGRSKNCQRTNKNVLGPMQ

SEQ ID NO: 811 - protein, 1017 aa, uncultured bacterium]
MRVDSLGRCLSDEEWARVIYHLCKHRGFHWISRAEAKQTEGDSKSEGGKVKQGLAGTAKLMDEKGYRSAAEMVLAEFPEAQRNKQGEYRKALSRELLAKELALLFARQRVFGNRHATDTLETAILGNSDKKSGLFWQQKPALAGADLLKMLGTCTFEKNEYRAPKASFTAERHVWLTRLNNLRIVTDGITRQLTEQERQLVLPLPYRQAGDLTYKQLGMALTKAGLLEAGCFKFIGLAYPTEAQKAEGKTKDPESATLVKIPAWQELRQTLNKASLNDEWEKLSGDALCGQPEIFDKIAWILSVYKDDDEVRTELAKLVLPNPEGLTEALLNIRFDKFHALSLKALRAIVPHMEKGLRYDEACVQAGYHHSQLHKIGEGEHKYLPPLYDGRDGDGRMIFAEDADIPRNPVVLRSLNQARKVVNAIIRRYGSPSAVHIEMARDLSRPFDERNKIKKDQDEYQARNQRDREQFIELFGHPPKGLEFEKWRLYREQNGQCAYSQKPLASSGDVAEIFLDGSTEIDHALPYSRSFDDSKNNKVLVLTRENRDKGNRTPYEYLGGAENSERWQRFFSFVESNKAYRLAKRTRLLRKDFGAKESEEFRERNLNDTRYVCRFFKNYVEQHLKLAEGSEAKRCVVVSGQLTNFLRTRWGLLKIRSDSDRHHALDAAVVAACSHSMVQRLSNYSRTRELEQVRDGFVNIETGEIVNPAMHQQLREHFPDPWPYFRHELEARLKIDSPALLREEMARLSSYTEEELAALKPLFVSRAPQRRNGGAAHKDTIYGQPEKLKKNGSVSQKVALASLALKDIDLLADPHRNAKLYGAIRERLEAHGGKGDKAFPATNPLRKPDKEGNPTGPIVRTVTKVIDKLSGIPVRGGIAKNDTMLRVDVFTKAGRFHLVPVYVHHRVTGLPNQAITRGKDENQWAIIDDTFEWRFSLYPNDLVQIRLKDETHLGYYASTDRSTSSISIWAHDRNQSVGKDGLIRSIGVTTAKDIEKFHVDTLGNVYPAPPEKRRGLA

SEQ ID NO: 812 - protein, 600 aa, uncultured bacterium]
VNAIIKKHGSLSAVHIEMARDLSRPLDERREVKKLQEEFKDRNDKARESFEADHGYRPKGIVFEKWMLYREQHGKCAYSMEGLDIDRVLNDANYAQIDHALPYSRSYDDSKNNKVLVLTRENQNKGNRTAYEYLTSFAGGEDGDRWRNYAAWVNSNKSYRMAKRNRLLRKNYGPDEASGFKDRNLNDTRYICKFFKNYVEEHLQLAPRADGNANKRCVVVNGQLTAFLRARWGLSKVRSESDRHHALDAAVVAACSHGMVKALADYARNKEVAYLREGFPDPETGEIINPEAHARGVHHFPEPWAHFRHELQVRLYSDDLQALREDLQRLGTYSEQDLLGVRTLFVSRAPQRRNDGAVHKETIYAQPEALRKQGGVVQKVPLTSLSLKDLDNLADPHRNAKLYTALRARLEAHGGKADKAFGPDQPFYKPDKNGNPTGPIVRTIKLVIDKLSGIPIRGGVAKNDTMLRVDVFTKAGKFHLVPVYVHHRVTGLPDRAIVAFKDEVEWTQVDDSFKFLFSIHPNDLIRIGLKAKEPMIGYFASCHRGTGAFNVWSHDRNTSVGKSGSVEGIGIKTALSLEKLNIDVLGNVYPARPEQRHGLA

SEQ ID NO: 813 - protein, 1011 aa, uncultured delta
MSSKAIDSLEQLDLFKPQEYTLGLDLGIKSIGWAILSGERIANAGVYLFETAEELNSTGNKLISKAAERGRKRRIRRMLDRKARRGRHIRYLLEREGLPTDELEEVVVHQSNRTLWDVRAEAVERKLTKQELAAVLFHLVRHRGYFPNTKKLPPDDESDSADEEQGKINRATSRLREELKASDCKTIGQFLAQNRDRQRNREGDYSNLMARKLVFEEALQILAFQRKQGHELSKDFEKTYLDVLMGQRSGRSPKLGNCSLIPSELRAPSSAPSTEWFKFLQNLGNLQISNAYREEWSIDAPRRAQIIDACSQRSTSSYWQIRRDFQIPDEYRFNLVNYERRDPDVDLQEYLQQQERKTLANFRNWKQLEKIIGTGHPIQTLDEAARLITLIKDDEKLSDQLADLLPEASDKAITQLCELDFTTAAKISLEAMYRILPHMNQGMGFFDACQQESLPEIGVPPAGDRVPPFDEMYNPVVNRVLSQSRKLINAVIDEYGMPAKIRVELARDLGKGRELRERIKLDQLDKSKQNDQRAEDFRAEFQQAPRGDQSLRYRLWKEQNCTCPYSGRMIPVNSVLSEDTQIDHILPISQSFDNSLSNKVLCFTEENAQKSNRTPFEYLDAADFQRLEAISGNWPEAKRNKLLHKSFGKVAEEWKSRALNDTRYLTSALADHLRHHLPDSKIQTVNGRITGYLRKQWGLEKDRDKHTHHAVDAIVVACTTPAIVQQVTLYHQDIRRYKKLGEKRPTPWPETFRQDVLDVEEEIFITRQPKKVSGGIQTKDTLRKHRSKPDRQRVALTKVKLADLERLVEKDASNRNLYEHLKQCLEESGDQPTKAFKAPFYMPSGPEAKQRPILSKVTLLREKPEPPKQLTELSGGRRYDSMAQGRLDIYRYKPGGKRKDEYRVVLQRMIDLMRGEENVHVFQKGVPYDQGPEIEQNYTFLFSLYFDDLVEFQRSADSEVIRGYYRTFNIANGQLKISTYLEGRQDFDFFGANRLAHFAKVQVNLLGKVIK

SEQ ID NO: 814 - protein, 1011 aa, uncultured delta proteobacterium HF0070_07E19; identical to SEQ ID NO: 813

SEQ ID NO: 815 - protein, 1120 aa, Veillonella sp.
MGFKANLVNLFTDEDIEVILPEEKEFKSINLHEGIYEDVRDAYEDAWGDRFAIVDQCKVLHDIIVISSIIKPGQSLSEAKIESYNQHKEDLVLLKSVLKEDRKLYDDMFVVDTDKGTNYVKYTKQGVNGNTSATQEEFYKYVRKVVSVLPETEHTRRIVQKLEEGTFLPLQRISKNGVVPYQLHKEELVRILDKATVNFPFLNKVENGLTVADKIISILEFKIPYYVGPLNPTHSIENGGFAWVVRKEAGQVLPWNFEQKVDVQASAVKFIENLTNKCTYLIDQDVLPKYSLLYAEFSLLNELNNIRVNDKPLPADVKQAFIRDHFISLQDSKTATKKVVAKYLVDNNYVSQPPIITGMDQQIATKLTSHRDMTRILGEHFDHAMAEDIIRYITIFGESKDMLRQVLKNYYGDRLTTEQIKKLGKLTYTGWGRLSKKFLSDIWGMKKNDDDAEAGTIIEHMREGQENLMQLLSSSYSFIDVVQEYVTNVLGEKEKTAFEMLEDLSLSPMVKRSVWQTLRILDEIVSIRKELPKKIFVEVARTNKADKKRTQSRKALLEELYKQIKDEDVHVLQQELESKEDSALNSKKLYLYFTQMGRCMYSGRRIDIHELFTDKYDIDHIYPRSLTKDDSWHNIVLVEKQLNAEKTDRFPILSAIQSKQKGFWKLLWDRGFISEKKYDRLVRTTDLTDEELNQFINRQMVSTNQSVKAVTTLLHQLYPETEVVFSKAENVSDFRHDYDFVKVRSINHHHHAKDAYLNIVVGNVYHEKFTKNFLSFAKQKGTRRTYNLTKIFEYEIKLTEESKKVIWDPNIHMDIVKKMMKSNDVRVTQRAVPQKGGLSDETIYKKGIAKRGVYLPLKSSDERVRDVEKYGGRTSITISEYIILNIRDTSDQDRIEIFSLPLYIAGKKDIHKAIEEAYLSTCKKPASVVDIQILYRGLYIGSKVNINGFTYYMGGKTGSNVSIDSAVDVVMDITSSVYIKLLEKVAIKKIENPKTFRIENIKTSYNHKEVTVSKEQNIALYQELLKKLDTPLFSKMKGNKLEEFRTVGFDTFIALSLEEQASVLLEVLNVLTNFKTKRDITKIGMTSSRSTLGINISNTEQFSVITTSITGLYEQEIKIK

SEQ ID NO: 816 - protein, 983 aa, Verminephrobacter aporrectodeae
MRRRRDRLLKRKARMHDQLMRHGFFPADAAGRKVLERLNPYQLRAKGLHQALTPGEFARALFHINQRRGFQSNRKTDRKDNESGALKQAISELRAQIHDSGCATVGEWFWKERMQQKPEGVHRQGVRARYRETPYTTDEGRQRIDKRYDLYVDRAMIEQEFDALWAVQAALQPGLFTDAACKELRYTLLFQRKLRPVKPGRCTLLPEEERAPLALPSTQRFRILQEVNHLRLLDEALREVPLTLAQRDALVAALESQGKLGFAPMRKLLKLPGTVKFNLEDEKRTELKGNATSAILARKDLFGPAWAGFDAALQDEIVWQLVSEEGEGRLIAWLQQHTGVDEARAEAIADTSLPEGYGSLSRKALERIVPALQREVCSYDKAVQAAGFAHHSDLGFDFEHSGDEVQQVGERIIASTGEVRPLFAFKQLPYYGKALQRHVAFGSGKPEDPEEKRHGKIANPTVHIGLNQVRTVVNALIRRYGRPSEVVVELARDLKQSREQQQETQRKQAENQRRNTRIRERIAETLGISPERVRSSDIQKWILWEELSFDVVDRRCPYSGEQISTTMLLSPKVEIEHILPFSQTLDDSLNNRTVALREANRIKRNRTPWDARADFEARGWSYEGILHRAERMPLRKRYRFAPDGYQRWLGEDKDFLARALNDTRYLSRVAANYLRLVCPKPQGVRVIPGRMTAMLRAKFGLNDVLGLDGEKNRNDHRHHAVDACVIGVTDQGLMQRFARASAQAREDGLTRLVQDMPLPWPSYRDHVERAVRHIWVSHKPDHGFEGAMMEETAYGIRKDGSIKPRRKADGSAGREVVNLIRITESRQPVRHGVDSQGQPLPYKGYVGGSNYCIEITANDQGKWEGAVISTFEAYRIVRASGWGRLRHCSHGQNGRPLMMRLMIGDAVRLALDGSEKTMRVVKISANGQVFLVAPNEANVDARNRDKADPFAYVSKKAGSFQSAKARQVSISPIGELRDPGFKG

SEQ ID NO: 817 - protein, 5 aa, synthetic construct
  REGION 1..5: note = synthetic sequence
GSGGS

SEQ ID NO: 818 - protein, 6 aa, synthetic construct
  REGION 1..6: note = synthetic sequence
GGSGGS

SEQ ID NO: 819 - protein, 4 aa, synthetic construct
  REGION 1..4: note = synthetic sequence
GGGS

SEQ ID NO: 820 - protein, 4 aa, synthetic construct
  REGION 1..4: note = synthetic sequence
GGSG

SEQ ID NO: 821 - protein, 5 aa, synthetic construct
  REGION 1..5: note = synthetic sequence
GGSGG

SEQ ID NO: 822 - protein, 5 aa, synthetic construct
  REGION 1..5: note = synthetic sequence
GSGSG

SEQ ID NO: 823 - protein, 5 aa, synthetic construct
  REGION 1..5: note = synthetic sequence
GSGGG

SEQ ID NO: 824 - protein, 5 aa, synthetic construct
  REGION 1..5: note = synthetic sequence
GGGSG

SEQ ID NO: 825 - protein, 5 aa, synthetic construct
  REGION 1..5: note = synthetic sequence
GSSSG

SEQ ID NO: 826 - protein, 16 aa, synthetic construct
  REGION 1..16: note = synthetic sequence
RQIKIWFQNRRMKWKK

SEQ ID NO: 827 - RNA, 86 nt, synthetic construct
  misc_feature 1..86: note = synthetic sequence
  source 1..86: mol_type = other RNA
ggaaccattcaaaacagcatagcaagttaaaataaggctagtccgttatcaacttgaaaaagtggcaccgagtcggtgcttttttt

SEQ ID NO: 828 - RNA, 67 nt, synthetic construct
  misc_feature 1..67: note = synthetic sequence
  source 1..67: mol_type = other RNA
tagcaagttaaaataaggctagtccgttatcaacttgaaaaagtggcaccgagtcggtgcttttttt

SEQ ID NO: 829 - RNA, 88 nt, Streptococcus pyogenes
  source 1..88: mol_type = other RNA
gttggaaccattcaaaacagcatagcaagttaaaataaggctagtccgttatcaacttgaaaaagtggcaccgagtcggtgctttttt

SEQ ID NO: 830 - RNA, 93 nt, Listeria innocua
  source 1..93: mol_type = other RNA
atattgttagtattcaaaataacatagcaagttaaaataaggctttgtccgttatcaacttttaattaagtagcgctgtttcggcgctttttt

SEQ ID NO: 831 - RNA, 104 nt, Streptococcus mutans
  source 1..104: mol_type = other RNA
tgttggaatcattcgaaacaacacagcaagttaaaataaggcagtgatttttaatccagtccgtacacaacttgaaaaagtgcgcaccgattcggtgctttttt

SEQ ID NO: 832 - RNA, 95 nt, Streptococcus thermophilus
  source 1..95: mol_type = other RNA
ttgtggtttgaaaccattcgaaacaacacagcgagttaaaataaggcttagtccgtactcaacttgaaaaggtggcaccgattcggtgttttttt

SEQ ID NO: 833 - RNA, 118 nt, Streptococcus thermophilus
  source 1..118: mol_type = other RNA
taataatagtgtaagggacgccttacacagttacttaaatcttgcagaagctacaaagataaggcttcatgccgaaatcaacaccctgtcattttatggcagggtgttttcgttattt

SEQ ID NO: 834 - RNA, 112 nt, Neisseria meningitidis
  source 1..112: mol_type = other RNA
catattgtcgcactgcgaaatgagaaccgttgctacaataaggccgtctgaaaagatgtgccgcaacgctctgccccttaaagcttctgctttaaggggcatcgtttatttc

SEQ ID NO: 835 - RNA, 110 nt, Pasteurella multocida
  source 1..110: mol_type = other RNA
gcatattgttgcactgcgaaatgagagacgttgctacaataaggcttctgaaaagaatgaccgtaacgctctgccccttgtgattcttaattgcaaggggcatcgttttt

SEQ ID NO: 836 - RNA, 115 nt, Mycoplasma mobile
  source 1..115: mol_type = other RNA
tattatgtatttcgaaatacagatgtacagttaagaatacataagaatgatacatcactaaaaaaaggctttatgccgtaactactacttattttcaaaataagtagtttttttt

SEQ ID NO: 837 - RNA, 26 nt, synthetic construct
  misc_feature 1..26: note = synthetic sequence
  source 1..26: mol_type = other RNA
tagcaagttaaaataaggctagtccg

SEQ ID NO: 838 - RNA, 36 nt, Streptococcus pyogenes
  source 1..36: mol_type = other RNA
ttgttggaaccattcaaaacagcatagcaagttaaa

SEQ ID NO: 839 - RNA, 36 nt, Streptococcus mutans
  source 1..36: mol_type = other RNA
gtgttggaatcattcgaaacaacacagcaagttaaa

SEQ ID NO: 840 - RNA, 36 nt, Streptococcus thermophilus
  source 1..36: mol_type = other RNA
ggtttgaaaccattcgaaacaacacagcgagttaaa

SEQ ID NO: 841 - RNA, 36 nt, Streptococcus thermophilus
  source 1..36: mol_type = other RNA
cttacacagttacttaaatcttgcagaagctacaaa

SEQ ID NO: 842 - RNA, 36 nt, Listeria innocua
  source 1..36: mol_type = other RNA
atattgttagtattcaaaataacatagcaagttaaa

SEQ ID NO: 843 - RNA, 34 nt, Listeria innocua
  source 1..34: mol_type = other RNA
attgttagtattcaaaataacatagcaagttaaa

SEQ ID NO: 844 - RNA, 36 nt, Treponema denticola
  source 1..36: mol_type = other RNA
atttaagatccatcttaaattacacaacgagttcaa

SEQ ID NO: 845 - RNA, 36 nt, Neisseria meningitidis
  source 1..36: mol_type = other RNA
attgtcgcactgcgaaatgagaaccgttgctacaat

SEQ ID NO: 846 - RNA, 38 nt, Neisseria meningitidis
  source 1..38: mol_type = other RNA
atattgtcgcactgcgaaatgagaaccgttgctacaat

SEQ ID NO: 847 - RNA, 36 nt, Streptococcus gordonii; identical to SEQ ID NO: 841
  source 1..36: mol_type = other RNA

SEQ ID NO: 848 - RNA, 36 nt, Bifidobacterium bifidum
  source 1..36: mol_type = other RNA
atgatcaaggtcattgacctgacaggcataaattga

SEQ ID NO: 849 - RNA, 36 nt, Lactobacillus salivarius
  source 1..36: mol_type = other RNA
ggttttgacctcattgatttaacattctgagttgaa

SEQ ID NO: 850 - RNA, 37 nt, Francisella tularensis
  source 1..37: mol_type = other RNA
gtttcagttgttagattatttggtatgtacttgtgtt

SEQ ID NO: 851 - RNA, 37 nt, Francisella tularensis
  source 1..37: mol_type = other RNA
attacagagcattaattatttggtacatttataattt

SEQ ID NO: 852 - RNA, 37 nt, Legionella pneumophila
  source 1..37: mol_type = other RNA
atttcagggtatcgaaatttagatgatttctaattta

SEQ ID NO: 853 - RNA, 36 nt, Nitratifractor salsuginis
  source 1..36: mol_type = other RNA
tgtaacagggtagggttttttgaggggtcttaaaat

SEQ ID NO: 854 - RNA, 36 nt, Butyrivibrio fibrisolvens
  source 1..36: mol_type = other RNA
agtttctaatcacttaattttttcggacctactaaa

SEQ ID NO: 855 - RNA, 36 nt, Streptobacillus moniliformis
  source 1..36: mol_type = other RNA
gattcacattattcaagtttactacagattctgtat

SEQ ID NO: 856 - RNA, 36 nt, Mycoplasma mobile
  source 1..36: mol_type = other RNA
agttaagaatacataagaatgatacatcactaaaaa

SEQ ID NO: 857 - RNA, 44 nt, Capnocytophaga ochracea
  source 1..44: mol_type = other RNA
attgtgaattgctttcaaattgtgcgacaaaagtaggtataata

SEQ ID NO: 858 - RNA, 36 nt, Acidovorax ebreus
  source 1..36: mol_type = other RNA
attgcagcaacggctctcaccccggataaccacaat

SEQ ID NO: 859 - RNA, 36 nt, Wolinella succinogenes
  source 1..36: mol_type = other RNA
atagccgctgcctactcagccatttagcgcagcgac

SEQ ID NO: 860 - RNA, 37 nt, Wolinella succinogenes
  source 1..37: mol_type = other RNA
tttgttaaagctggatgggattattatagagtgttgc

SEQ ID NO: 861 - RNA, 37 nt, Wolinella succinogenes
  source 1..37: mol_type = other RNA
tttcaaggcatcgaacggatttgctataaagtgttgc

SEQ ID NO: 862 - RNA, 36 nt, Prevotella ruminicola
  source 1..36: mol_type = other RNA
ttttgcacacgtaagattcctacatcttatcacaat

SEQ ID NO: 863 - RNA, 48 nt, Fibrobacter succinogenes
  source 1..48: mol_type = other RNA
attgtgaattgctttcagattatgaaaataatatagttaaaatttttg

SEQ ID NO: 864 - RNA, 36 nt, Campylobacter jejuni
  source 1..36: mol_type = other RNA
attttatttcgattttaatcaaccctaaatttcaat

SEQ ID NO: 865 - RNA, 36 nt, Campylobacter jejuni
  source 1..36: mol_type = other RNA
attttagtccctttttaaatttcttatgagattata

SEQ ID NO: 866 - RNA, 25 nt, Campylobacter jejuni
  source 1..25: mol_type = other RNA
aagaaatttaaaaagggactaaaat

SEQ ID NO: 867 - RNA, 36 nt, Pasteurella multocida
  source 1..36: mol_type = other RNA
attgtagcaacgtctctcatttcgcagtgcaacaat

SEQ ID NO: 868 - RNA, 36 nt, Rhodopseudomonas palustris
  source 1..36: mol_type = other RNA
gccgtggctttcctaccgatttcccaccgcatgatt

SEQ ID NO: 869 - RNA, 36 nt, Olsenella uli
  source 1..36: mol_type = other RNA
tctgaattaccagtcagaacgatactgcgagtcaaa

SEQ ID NO: 870 - RNA, 36 nt, Rhodospirillum rubrum
  source 1..36: mol_type = other RNA
gttccatggccccgtcccacacgccatgatagagcg

SEQ ID NO: 871 - RNA, 36 nt, Rhodospirillum rubrum
  source 1..36: mol_type = other RNA
aaacgggagaaccgtcccacacggccatggtagagt

SEQ ID NO: 872 - RNA, 36 nt, Dinoroseobacter shibae
  source 1..36: mol_type = other RNA
ttaacggctcgaccgcgaattctgaacgtaaagaca

SEQ ID NO: 873 - RNA, 36 nt, Verminephrobacter eiseniae
  source 1..36: mol_type = other RNA
ttagcgtccagagcgcatatcccagtgagatatccg

SEQ ID NO: 874 - RNA, 75 nt, Streptococcus pyogenes
  source 1..75: mol_type = other RNA
aaacagcatagcaagttaaaataaggctagtccgttatcaacttgaaaaagtggcaccgagtcggtgcttttttt

SEQ ID NO: 875 - RNA, 77 nt, Listeria innocua
  source 1..77: mol_type = other RNA
aaataacatagcaagttaaaataaggctttgtccgttatcaacttttaattaagtagcgctgtttcggcgctttttt

SEQ ID NO: 876 - RNA, 73 nt, synthetic construct
  misc_feature 1..73: note = synthetic sequence
  source 1..73: mol_type = other RNA
aacagcatagcaagttaaaataaggctagtccgttatcaacttgaaaaagtggcaccgagtcggtgctttttt

SEQ ID NO: 877 - RNA, 33 nt, Francisella novicida
  source 1..33: mol_type = other RNA
tataaatgtaccaaataattaatgctctgtaat

SEQ ID NO: 878 - RNA, 74 nt, Campylobacter jejuni
  source 1..74: mol_type = other RNA
aagaaatttaaaaagggactaaaataaagagtttgcgggactctgcggggttacaatcccctaaaaccgctttt

SEQ ID NO: 879 - RNA, 96 nt, Francisella novicida
  source 1..96: mol_type = other RNA
atctaaaattataaatgtaccaaataattaatgctctgtaatcatttaaaagtattttgaacggacctctgtttgacacgtctgaataactaaaaa

SEQ ID NO: 880 - RNA, 109 nt, Streptococcus thermophilus2
  source 1..109: mol_type = other RNA
tgtaagggacgccttacacagttacttaaatcttgcagaagctacaaagataaggcttcatgccgaaatcaacaccctgtcattttatggcagggtgttttcgttattt

SEQ ID NO: 881 - RNA, 110 nt, Mycoplasma mobile
  source 1..110: mol_type = other RNA
tgtatttcgaaatacagatgtacagttaagaatacataagaatgatacatcactaaaaaaaggctttatgccgtaactactacttattttcaaaataagtagtttttttt

SEQ ID NO: 882 - RNA, 92 nt, Listeria innocua
  source 1..92: mol_type = other RNA
attgttagtattcaaaataacatagcaagttaaaataaggctttgtccgttatcaacttttaattaagtagcgctgtttcggcgcttttttt

SEQ ID NO: 883 - RNA, 89 nt, Streptococcus pyogenes
  source 1..89: mol_type = other RNA
gttggaaccattcaaaacagcatagcaagttaaaataaggctagtccgttatcaacttgaaaaagtggcaccgagtcggtgcttttttt

SEQ ID NO: 884 - RNA, 107 nt, Streptococcus mutans
  source 1..107: mol_type = other RNA
gttggaatcattcgaaacaacacagcaagttaaaataaggcagtgatttttaatccagtccgtacacaacttgaaaaagtgcgcaccgattcggtgcttttttattt

SEQ ID NO: 885 - RNA, 96 nt, Streptococcus thermophilus
  source 1..96: mol_type = other RNA
ttgtggtttgaaaccattcgaaacaacacagcgagttaaaataaggcttagtccgtactcaacttgaaaaggtggcaccgattcggtgtttttttt

SEQ ID NO: 886 - RNA, 102 nt, Neisseria meningitidis
  source 1..102: mol_type = other RNA
acatattgtcgcactgcgaaatgagaaccgttgctacaataaggccgtctgaaaagatgtgccgcaacgctctgccccttaaagcttctgctttaaggggca

SEQ ID NO: 887 - RNA, 110 nt, Pasteurella multocida; identical to SEQ ID NO: 835
  source 1..110: mol_type = other RNA

SEQ ID NO: 888 - RNA, 37 nt, Francisella novicida
  source 1..37: mol_type = other RNA
aacacaagtacataccaaataatctaacaactgaaac

SEQ ID NO: 889 - RNA, 37 nt, Francisella novicida
  source 1..37: mol_type = other RNA
aaattataaatgtaccaaataattaatgctctgtaat

SEQ ID NO: 890 - RNA, 37 nt, Wolinella succinogenes; identical to SEQ ID NO: 861
  source 1..37: mol_type = other RNA

SEQ ID NO: 891 - RNA, 37 nt, Wolinella succinogenes; identical to SEQ ID NO: 860
  source 1..37: mol_type = other RNA

SEQ ID NO: 892 - RNA, 37 nt, gamma proteobacterium
  source 1..37: mol_type = other RNA
atttcagtgtatagaatgttgggatgcattctgaata

SEQ ID NO: 893 - RNA, 37 nt, gamma proteobacterium
  source 1..37: mol_type = other RNA
ataacaagggagtatttgctggaataagctctgaaac

SEQ ID NO: 894 - RNA, 37 nt, Sutterella wadsworthensis
  source 1..37: mol_type = other RNA
gtttccaagcaatagctcgtggcgttatgatttctgt

SEQ ID NO: 895 - RNA, 37 nt, Sutterella wadsworthensis
  source 1..37: mol_type = other RNA
ggtgatttcctatagctcatagcgttatgatctctaa

SEQ ID NO: 896 - RNA, 37 nt, Legionella pneumophila; identical to SEQ ID NO: 852
  source 1..37: mol_type = other RNA

SEQ ID NO: 897 - RNA, 36 nt, Listeria innocua; identical to SEQ ID NO: 842
  source 1..36: mol_type = other RNA

SEQ ID NO: 898 - RNA, 36 nt, Streptococcus thermophilus; identical to SEQ ID NO: 840
  source 1..36: mol_type = other RNA

SEQ ID NO: 899 - RNA, 36 nt, Streptococcus mutans; identical to SEQ ID NO: 839
  source 1..36: mol_type = other RNA

SEQ ID NO: 900 - RNA, 36 nt, Streptococcus pyogenes; identical to SEQ ID NO: 838
  source 1..36: mol_type = other RNA

SEQ ID NO: 901 - RNA, 36 nt, Fusobacterium nucleatum
  source 1..36: mol_type = other RNA
atttttaatttaagtaataaaaaatggagcatatac

SEQ ID NO: 902 - RNA, 36 nt, Filifactor alocis
  source 1..36: mol_type = other RNA
agttgactaccatatgagattacactacacggttca

SEQ ID NO: 903 - RNA, 36 nt, Treponema denticola; identical to SEQ ID NO: 844
  source 1..36: mol_type = other RNA

SEQ ID NO: 904 - RNA, 36 nt, Solobacterium moorei
  source 1..36: mol_type = other RNA
cttataccagtaagataatttacatagtaagttcaa

SEQ ID NO: 905 - RNA, 36 nt, Veillonella atypica
  source 1..36: mol_type = other RNA
gttttggaggtttacagaattacactacgagttcaa

SEQ ID NO: 906 - RNA, 36 nt, Finegoldia magna
  source 1..36: mol_type = other RNA
gtttaatacctatatgagattacatcatgagttcaa

SEQ ID NO: 907 - RNA, 36 nt, Olsenella uli; identical to SEQ ID NO: 869
  source 1..36: mol_type = other RNA

SEQ ID NO: 908 - RNA, 36 nt, Lactobacillus rhamnosus
  source 1..36: mol_type = other RNA
caacttgaattgattgatctgacatctacgagttga

SEQ ID NO: 909 - RNA, 36 nt, Lactobacillus gasseri
  source 1..36: mol_type = other RNA
tgattagatttcattgatctaacagccatctaaaac

SEQ ID NO: 910 - RNA, 36 nt, Lactobacillus gasseri
  source 1..36: mol_type = other RNA
acactaaactttattgatctaacaaccagatttaaa

SEQ ID NO: 911 - RNA, 36 nt, Oenococcus kitaharae
  source 1..36: mol_type = other RNA
gggttctacctcattgatctgacacacagcattgaa

SEQ ID NO: 912 - RNA, 36 nt, Bifidobacterium bifidum; identical to SEQ ID NO: 848
  source 1..36: mol_type = other RNA

SEQ ID NO: 913 - RNA, 36 nt, Staphylococcus pseudintermedius
  source 1..36: mol_type = other RNA
gttttacttctttctaaataaacatagttaagttaa

SEQ ID NO: 914 - RNA, 36 nt, Eubacterium rectale
  source 1..36: mol_type = other RNA
attttatagtcacgtaaatttttcagatctactaaa

SEQ ID NO: 915 - RNA, 38 nt, Enterococcus faecalis
  source 1..38: mol_type = other RNA
attttactgataagaaattattgagaatctacaaaaat

SEQ ID NO: 916 - RNA, 36 nt, Streptococcus thermophilus; identical to SEQ ID NO: 841
  source 1..36: mol_type = other RNA

SEQ ID NO: 917 - RNA, 36 nt, Staphylococcus lugdunensis
  source 1..36: mol_type = other RNA
cttgtacttatacctaaaattacagaatctactgaa

SEQ ID NO: 918 - RNA, 36 nt, Eubacterium dolichum
  source 1..36: mol_type = other RNA
atcataatctagcaaaagtttatatgatctaacaaa

SEQ ID NO: 919 - RNA, 36 nt, Mycoplasma mobile; identical to SEQ ID NO: 856
  source 1..36: mol_type = other RNA

SEQ ID NO: 920 - RNA, 36 nt, Mycoplasma ovipneumoniae
  source 1..36: mol_type = other RNA
attttactctagtaagaaattgtcgcacaaaaataa

SEQ ID NO: 921 - RNA, 36 nt, Mycoplasma gallisepticum
  source 1..36: mol_type = other RNA
attattgcttacacaattattgtcgtgctaaaataa

SEQ ID NO: 922 - RNA, 36 nt, Mycoplasma canis
  source 1..36: mol_type = other RNA
attattgtttacccaaatattgtacatcctaaatca

SEQ ID NO: 923 - RNA, 36 nt, Mycoplasma synoviae
  source 1..36: mol_type = other RNA
tacttacttaacaaaataattgtacgattccaaaat

SEQ ID NO: 924 - RNA, 36 nt, Aminomonas paucivorans
  source 1..36: mol_type = other RNA
gccttccctccctgccgaaggagcagatcctctcct

SEQ ID NO: 925 - RNA, 36 nt, Clostridium perfringens
  source 1..36: mol_type = other RNA
ttatagtaactagttaaactctcgatatgctatacc

SEQ ID NO: 926 - RNA, 36 nt, Clostridium cellulolyticum
  source 1..36: mol_type = other RNA
attatagcaacaattcaggctccgatatgccataat

SEQ ID NO: 927 - RNA, 36 nt, Acidovorax ebreus; identical to SEQ ID NO: 858
  source 1..36: mol_type = other RNA

SEQ ID NO: 928 - RNA, 36 nt, Neisseria meningitidis; identical to SEQ ID NO: 845
  source 1..36: mol_type = other RNA

SEQ ID NO: 929 - RNA, 36 nt, Pasteurella multocida
  source 1..36: mol_type = other RNA
attgttgcactgcgaaatgagagacgttgctacaat

SEQ ID NO: 930 - RNA, 36 nt, phylotype Rs-D17
  source 1..36: mol_type = other RNA
tttgtaacttatctgagagaggatggttattataat

SEQ ID NO: 931 - RNA, 36 nt, Wolinella succinogenes; identical to SEQ ID NO: 859
  source 1..36: mol_type = other RNA

SEQ ID NO: 932 - RNA, 36 nt, Campylobacter jejuni
  source 1..36: mol_type = other RNA
ataatacaaaaatcatttttttaaacaaacataaac

SEQ ID NO: 933 - RNA, 36 nt, Campylobacter jejuni
  source 1..36: mol_type = other RNA
tataatctcataagaaatttaaaaagggactaaaat

SEQ ID NO: 934 - RNA, 36 nt, Helicobacter mustelae
  source 1..36: mol_type = other RNA
gtatttgtcaataaatatactttataatggcaagat

SEQ ID NO: 935 - RNA, 36 nt, Roseburia intestinalis
  source 1..36: mol_type = other RNA
ttgtaataacctaattatcacttggtatgatataat

SEQ ID NO: 936 - RNA, 36 nt, Lactobacillus coryniformis
  source 1..36: mol_type = other RNA
ttttattctatagtaagttttcagctaaaatagatc

SEQ ID NO: 937 - RNA, 36 nt, Rhodopseudomonas palustris; identical to SEQ ID NO: 868
  source 1..36: mol_type = other RNA

SEQ ID NO: 938 - RNA, 36 nt, Cand. Puniceispirillum marinum
  source 1..36: mol_type = other RNA
taaccataggctcctcaatcaccagagtgttattgc

SEQ ID NO: 939 - RNA, 36 nt, Verminephrobacter eiseniae; identical to SEQ ID NO: 873
  source 1..36: mol_type = other RNA

SEQ ID NO: 940 - RNA, 36 nt, Ralstonia syzygii
  source 1..36: mol_type = other RNA
gttagtagcaaagcgcaattcccgatctgctggaaa

SEQ ID NO: 941 - RNA, 36 nt, Azospirillum B510
  source 1..36: mol_type = other RNA
ttaacggctggacccccgatccccatcgaatttcca

SEQ ID NO: 942 - RNA, 36 nt, Dinoroseobacter shibae; identical to SEQ ID NO: 872
  source 1..36: mol_type = other RNA

SEQ ID NO: 943 - RNA, 36 nt, Rhodospirillum rubrum; identical to SEQ ID NO: 870
  source 1..36: mol_type = other RNA

SEQ ID NO: 944 - RNA, 36 nt, Rhodospirillum rubrum; identical to SEQ ID NO: 871
  source 1..36: mol_type = other RNA

SEQ ID NO: 945 - RNA, 36 nt, Spirochaeta Buddy
  source 1..36: mol_type = other RNA
attagagataatcgctggtttttgttaagatataac

SEQ ID NO: 946 - RNA, 36 nt, Prevotella ruminicola; identical to SEQ ID NO: 862
  source 1..36: mol_type = other RNA

SEQ ID NO: 947 - RNA, 36 nt, Flavobacterium columnare
  source 1..36: mol_type = other RNA
agataaaattattctaatctttaatcttatcacaat

SEQ ID NO: 948 - RNA, 36 nt, Parvibaculum lavamentivorans
  source 1..36: mol_type = other RNA
cttgcgaaaagcgaccgcctctcgatttgctacaga

SEQ ID NO: 949 - RNA, 44 nt, Capnocytophaga ochracea; identical to SEQ ID NO: 857
  source 1..44: mol_type = other RNA

SEQ ID NO: 950 - RNA, 48 nt, Fibrobacter succinogenes; identical to SEQ ID NO: 863
  source 1..48: mol_type = other RNA

SEQ ID NO: 951 - RNA, 36 nt, Nitratifractor salsuginis; identical to SEQ ID NO: 853
  source 1..36: mol_type = other RNA

SEQ ID NO: 952 - RNA, 36 nt, Akkermansia muciniphila
  source 1..36: mol_type = other RNA
cttatacgggaactccacgataaggcattttacatg

SEQ ID NO: 953 - RNA, 88 nt, synthetic construct
  misc_feature 1..88: note = synthetic sequence
  source 1..88: mol_type = other RNA
ttggaaccattcaaaacagcatagcaagttaaaataaggctagtccgttatcaacttgaaaaagtggcaccgagtcggtgcttttttt

SEQ ID NO: 954 - RNA, 77 nt, synthetic construct
  misc_feature 1..77: note = synthetic sequence
  source 1..77: mol_type = other RNA
caaaacagcatagcaagttaaaataaggctagtccgttatcaacttgaaaaagtggcaccgagtcggtgcttttttt

SEQ ID NO: 955 - RNA, 61 nt, synthetic construct
  misc_feature 1..61: note = synthetic sequence
  source 1..61: mol_type = other RNA
caaaacagcatagcaagttaaaataaggctagtccgttatcaacttgaaaaagtttttttt

SEQ ID NO: 956 - RNA, 44 nt, synthetic construct
  misc_feature 1..44: note = synthetic sequence
  source 1..44: mol_type = other RNA
caaaacagcatagcaagttaaaataaggctagtccgtttttttt

SEQ ID NO: 957 - RNA, 72 nt, synthetic construct
  misc_feature 1..72: note = synthetic sequence
  source 1..72: mol_type = other RNA
caaaacagcatagcaagttaaaataaggctagtccggttcactgccgtataggcagctaagaaatttttttt

SEQ ID NO: 958 - RNA, 14 nt, synthetic construct
  misc_feature 1..14: note = synthetic sequence
  source 1..14: mol_type = other RNA
tagcaagttaaaat

SEQ ID NO: 959 - RNA, 102 nt, synthetic construct
  misc_feature 1..102: note = synthetic sequence
  misc_feature 1..80: note = n is a, c, g, or u
  source 1..102: mol_type = other RNA
nnnnnnnnnnnnnnnnnnnnnnnnnnnnnnnnnnnnnnnnnnnnnnnnnnnnnnnnnnnnnnnnnnnnnnnnnnnnnnnngttttagagctatgctgttttg

SEQ ID NO: 960 - RNA, 102 nt, synthetic construct
  misc_feature 1..102: note = synthetic sequence
  misc_feature 1..80: note = n is a, c, g, or u
  source 1..102: mol_type = other RNA
nnnnnnnnnnnnnnnnnnnnnnnnnnnnnnnnnnnnnnnnnnnnnnnnnnnnnnnnnnnnnnnnnnnnnnnnnnnnnnnngttttagagctatgttattttg

SEQ ID NO: 961 - RNA, 92 nt, exemplary
  misc_feature 1..80: note = n is a, c, g, or u
  source 1..92: mol_type = other RNA
nnnnnnnnnnnnnnnnnnnnnnnnnnnnnnnnnnnnnnnnnnnnnnnnnnnnnnnnnnnnnnnnnnnnnnnnnnnnnnnngttttagagcta

SEQ ID NO: 962 - RNA, 152 nt, synthetic construct
  misc_feature 1..152: note = synthetic sequence
  misc_feature 37..116: note = n is a, c, g, or u
  source 1..152: mol_type = other RNA
gttttagagctatgctgttttgaatggtcccaaaacnnnnnnnnnnnnnnnnnnnnnnnnnnnnnnnnnnnnnnnnnnnnnnnnnnnnnnnnnnnnnnnnnnnnnnnnnnnnnnnngttttagagctatgctgttttgaatggtcccaaaac

SEQ ID NO: 963 - RNA, 188 nt, synthetic construct
  misc_feature 1..188: note = synthetic sequence
  misc_feature 37..116: note = n is a, c, g, or u
  source 1..188: mol_type = other RNA
gttttagagctatgctgttttgaatggtcccaaaacnnnnnnnnnnnnnnnnnnnnnnnnnnnnnnnnnnnnnnnnnnnnnnnnnnnnnnnnnnnnnnnnnnnnnnnnnnnnnnnngttttagagctatgctgttttgaatggtcccaaaacgttttagagctatgctgttttgaatggtcccaaaac

SEQ ID NO: 964 - RNA, 22 nt, exemplary
  source 1..22: mol_type = other RNA
gttttagagctatgctgttttg

SEQ ID NO: 965 - RNA, 36 nt, Streptococcus pyogenes
  source 1..36: mol_type = other RNA
gttttagagctatgctgttttgaatggtcccaaaac

SEQ ID NO: 966 - RNA, 36 nt, Pasteurella multocida
  source 1..36: mol_type = other RNA
gttgtagttccctctctcatttcgcagtgctacaat

SEQ ID NO: 967 - RNA, 36 nt, Mycoplasma mobile
  source 1..36: mol_type = other RNA
gttttggtgtagtatcattcttatgtattcttaaac

SEQ ID NO: 968 - RNA, 37 nt, Francisella novicida
  source 1..37: mol_type = other RNA
gtttcagttgctgaattatttggtaaactactgttag

SEQ ID NO: 969 - RNA, 33 nt, Francisella novicida
  source 1..33: mol_type = other RNA
gtttcagttgctgaattatttggtaaactactg

SEQ ID NO: 970 - RNA, 36 nt, Streptococcus mutans
  source 1..36: mol_type = other RNA
gttttagagctgtgttgtttcgaatggttccaaaac

SEQ ID NO: 971 - RNA, 36 nt, Streptococcus thermophilus; identical to SEQ ID NO: 970
  source 1..36: mol_type = other RNA

SEQ ID NO: 972 - RNA, 36 nt, Streptococcus thermophilus
  source 1..36: mol_type = other RNA
gtttttgtactctcaagatttaagtaactgtacaac

SEQ ID NO: 973 - RNA, 36 nt, Listeria innocua
  source 1..36: mol_type = other RNA
gttttagagctatgttattttgaatgctaacaaaac

SEQ ID NO: 974 - RNA, 36 nt, Treponema denticola
  source 1..36: mol_type = other RNA
gtttgagagttgtgtaatttaagatggatctcaaac

SEQ ID NO: 975 - RNA, 36 nt, Neisseria meningitidis
  source 1..36: mol_type = other RNA
gttgtagctccctttctcatttcgcagtgctacaat

SEQ ID NO: 976 - RNA, 36 nt, Streptococcus gordonii; identical to SEQ ID NO: 972
  source 1..36: mol_type = other RNA

SEQ ID NO: 977 - RNA, 35 nt, Bifidobacterium bifidum
  source 1..35: mol_type = other RNA
gtttcaatgcctgtcagatcaatgactttgaccac

SEQ ID NO: 978 - RNA, 36 nt, Lactobacillus salivarius
  source 1..36: mol_type = other RNA
gtttcagaagtatgttaaatcaataaggttaagacc

SEQ ID NO: 979 - RNA, 37 nt, Francisella novicida
  source 1..37: mol_type = other RNA
ctaacagtagtttaccaaataattcagcaactgaaac

SEQ ID NO: 980 - RNA, 37 nt, Francisella novicida; identical to SEQ ID NO: 979
  source 1..37: mol_type = other RNA

SEQ ID NO: 981 - RNA, 37 nt, Legionella pneumophila
  source 1..37: mol_type = other RNA
ccaataatccctcatctaaaaatccaaccactgaaac

SEQ ID NO: 982 - RNA, 36 nt, Nitratifractor salsuginis
  source 1..36: mol_type = other RNA
gttttaagacccctcaaaaccccaccctgttacaat

SEQ ID NO: 983 - RNA, 36 nt, Butyrivibrio fibrisolvens
  source 1..36: mol_type = other RNA
gttttagtacccgggaaaattaagtgattggaaaac

SEQ ID NO: 984 - RNA, 36 nt, Streptobacillus moniliformis
  source 1..36: mol_type = other RNA
gatacagattcttggtaaatttgaataatgtgaatg

SEQ ID NO: 985 - RNA, 36 nt, Mycoplasma mobile; identical to SEQ ID NO: 967
  source 1..36: mol_type = other RNA

SEQ ID NO: 986 - RNA, 44 nt, Capnocytophaga ochracea
  source 1..44: mol_type = other RNA
tgttatcaatcgcaaaactacaaaatttgaaagcaattcacaac

SEQ ID NO: 987 - RNA, 36 nt, Acidovorax ebreus
  source 1..36: mol_type = other RNA
agtgtagctatccggggtgagagagggagctacaac

SEQ ID NO: 988 - RNA, 36 nt, Wolinella succinogenes
  source 1..36: mol_type = other RNA
attatagcgaggaatggctgagtaggcggctataac

SEQ ID NO: 989 - RNA, 37 nt, Wolinella succinogenes
  source 1..37: mol_type = other RNA
gcaacactttatagcaaatccgcttagcctgtgaaac

SEQ ID NO: 990 - RNA, 37 nt, Wolinella succinogenes; identical to SEQ ID NO: 989
  source 1..37: mol_type = other RNA

SEQ ID NO: 991 - RNA, 36 nt, Prevotella ruminicola
  source 1..36: mol_type = other RNA
gttgtggtttgatgtaggaaaggaatgatatacaac

SEQ ID NO: 992 - RNA, 48 nt, Fibrobacter succinogenes
  source 1..48: mol_type = other RNA
gttgttattgcactagtaaaactagaaaatctgaaagcaattcacaac

SEQ ID NO: 993 - RNA, 36 nt, Campylobacter jejuni
  source 1..36: mol_type = other RNA
attttaccataaagaaatttaaaaagggactaaaac

SEQ ID NO: 994 - RNA, 36 nt, Campylobacter jejuni
  source 1..36: mol_type = other RNA
gttttagtccctttttaaatttctttatggtaaaat

SEQ ID NO: 995 - RNA, 36 nt, Pasteurella multocida
  source 1..36: mol_type = other RNA
attgtagcactgcgaaatgagagagggaactacaac

SEQ ID NO: 996 - RNA, 36 nt, Rhodopseudomonas palustris
  source 1..36: mol_type = other RNA
agcctaccacggggaaatcggtagggaagccacggc

SEQ ID NO: 997 - RNA, 36 nt, Olsenella uli
  source 1..36: mol_type = other RNA
gttttggggcagtgtcgttttgactggtaatcaaac

SEQ ID NO: 998 - RNA, 36 nt, Rhodospirillum rubrum
  source 1..36: mol_type = other RNA
actctaccatggcggtgtgggacggggccatggaac

SEQ ID NO: 999 - RNA, 36 nt, Rhodospirillum rubrum; identical to SEQ ID NO: 998
  source 1..36: mol_type = other RNA

SEQ ID NO: 1000 - RNA, 36 nt, Dinoroseobacter shibae
  source 1..36: mol_type = other RNA
agtttagctgttcagaattcggggtccagccgcaac

SEQ ID NO: 1001 - RNA, 36 nt, Verminephrobacter eiseniae
  source 1..36: mol_type = other RNA
attgtagctcactgggatatgcgcactggccggaac

SEQ ID NO: 1002 - RNA, 37 nt, Francisella novicida; identical to SEQ ID NO: 968
  source 1..37: mol_type = other RNA

SEQ ID NO: 1003 - RNA, 37 nt, Francisella novicida; identical to SEQ ID NO: 968
  source 1..37: mol_type = other RNA

SEQ ID NO: 1004 - RNA, 37 nt, Wolinella succinogenes; identical to SEQ ID NO: 989
  source 1..37: mol_type = other RNA

SEQ ID NO: 1005 - RNA, 37 nt, Wolinella succinogenes; identical to SEQ ID NO: 989
  source 1..37: mol_type = other RNA

SEQ ID NO: 1006 - RNA, 37 nt, gamma proteobacterium
  source 1..37: mol_type = other RNA
gtttcagagcttatcccaacaaaccaacagctgaaac

SEQ ID NO: 1007 - RNA, 37 nt, gamma proteobacterium; identical to SEQ ID NO: 1006
  source 1..37: mol_type = other RNA

SEQ ID NO: 1008 - RNA, 37 nt, Sutterella wadsworthensis
  source 1..37: mol_type = other RNA
gcgaagatcataacgctacgagctatagcactgaaac

SEQ ID NO: 1009 - RNA, 37 nt, Sutterella wadsworthensis; identical to SEQ ID NO: 1008
  source 1..37: mol_type = other RNA

SEQ ID NO: 1010 - RNA, 37 nt, Legionella pneumophila; identical to SEQ ID NO: 981
  source 1..37: mol_type = other RNA

SEQ ID NO: 1011 - RNA, 36 nt, Listeria innocua; identical to SEQ ID NO: 973
  source 1..36: mol_type = other RNA

SEQ ID NO: 1012 - RNA, 36 nt, Streptococcus thermophilus; identical to SEQ ID NO: 970
  source 1..36: mol_type = other RNA

SEQ ID NO: 1013 - RNA, 36 nt, Streptococcus mutans; identical to SEQ ID NO: 970
  source 1..36: mol_type = other RNA

SEQ ID NO: 1014 - RNA, 36 nt, Streptococcus pyogenes; identical to SEQ ID NO: 965
  source 1..36: mol_type = other RNA

SEQ ID NO: 1015 - RNA, 36 nt, Fusobacterium nucleatum
  source 1..36: mol_type = other RNA
gtttgagagtaatgttattttaaatagattcaaaac

SEQ ID NO: 1016 - RNA, 36 nt, Filifactor alocis
  source 1..36: mol_type = other RNA
gtttgagagtagtgtaatttcatatggtagtcaaac

SEQ ID NO: 1017 - RNA, 36 nt, Treponema denticola; identical to SEQ ID NO: 974
  source 1..36: mol_type = other RNA

SEQ ID NO: 1018 - RNA, 36 nt, Solobacterium moorei
  source 1..36: mol_type = other RNA
gtttgagaactatgtaaattatgctggtagcaaaac

SEQ ID NO: 1019 - RNA, 36 nt, Veillonella atypica
  source 1..36: mol_type = other RNA
gtttgcgagtagtgtaattctgtaaatctctaaaac

SEQ ID NO: 1020 - RNA, 36 nt, Finegoldia magna
  source 1..36: mol_type = other RNA
gtttgagaatgatgtaatttcatataggtattaaac

SEQ ID NO: 1021 - RNA, 36 nt, Olsenella uli; identical to SEQ ID NO: 997
  source 1..36: mol_type = other RNA

SEQ ID NO: 1022 - RNA, 36 nt, Lactobacillus rhamnosus
  source 1..36: mol_type = other RNA
gtctcaggtagatgtcagatcaatcagttcaagagc

SEQ ID NO: 1023 - RNA, 36 nt, Lactobacillus gasseri
  source 1..36: mol_type = other RNA
gttttagatggttgttagatcaataaggtttagatc

SEQ ID NO: 1024 - RNA, 36 nt, Lactobacillus gasseri; identical to SEQ ID NO: 1023
  source 1..36: mol_type = other RNA

SEQ ID NO: 1025 - RNA, 36 nt, Oenococcus kitaharae
  source 1..36: mol_type = other RNA
gcttcagatgtgtgtcagatcaatgaggtagaaccc

SEQ ID NO: 1026 - RNA, 36 nt, Bifidobacterium bifidum
  source 1..36: mol_type = other RNA
gtttcagatgcctgtcagatcaatgactttgaccac

SEQ ID NO: 1027 - RNA, 36 nt, Staphylococcus pseudintermedius
  source 1..36: mol_type = other RNA
gttttagcactatgtttatttagaaagaggtaaaac

SEQ ID NO: 1028 - RNA, 36 nt, Eubacterium rectale
  source 1..36: mol_type = other RNA
attttagtaactgaataatttacgtgactgtaaaac

SEQ ID NO: 1029 - RNA, 36 nt, Enterococcus faecalis
  source 1..36: mol_type = other RNA
gtttttgtattctcaataatttcttatcagtaaaac

SEQ ID NO: 1030 - RNA, 36 nt, Streptococcus thermophilus; identical to SEQ ID NO: 972
  source 1..36: mol_type = other RNA

SEQ ID NO: 1031 - RNA, 36 nt, Staphylococcus lugdunensis
  source 1..36: mol_type = other RNA
gttttagtactctgtaattttaggtataagtgatac

SEQ ID NO: 1032 - RNA, 36 nt, Eubacterium dolichum
  source 1..36: mol_type = other RNA
gttttgttaccatatggatttttgctagattaagac

SEQ ID NO: 1033 - RNA, 36 nt, Mycoplasma mobile; identical to SEQ ID NO: 967
  source 1..36: mol_type = other RNA

SEQ ID NO: 1034 - RNA, 36 nt, Mycoplasma ovipneumoniae
  source 1..36: mol_type = other RNA
gtttttgtgctgtacaatttcttactagagtaaaac

SEQ ID NO: 1035 - RNA, 36 nt, Mycoplasma gallisepticum
  source 1..36: mol_type = other RNA
gttttagcactgtacaatacttgtgtaagcaataac

SEQ ID NO: 1036 - RNA, 36 nt, Mycoplasma canis
  source 1..36: mol_type = other RNA
gttttagtgttgtacaatatttgggtaaacaataac

SEQ ID NO: 1037 - RNA, 36 nt, Mycoplasma synoviae
  source 1..36: mol_type = other RNA
gttttggggttgtacaattattttgttaagtaaaac

SEQ ID NO: 1038 - RNA, 36 nt, Aminomonas paucivorans
  source 1..36: mol_type = other RNA
agcatagcatttcggagtgcggcagggagctatgac

SEQ ID NO: 1039 - RNA, 36 nt, Clostridium perfringens
  source 1..36: mol_type = other RNA
attatagcatatcgagaatttactaggaactataac

SEQ ID NO: 1040 - RNA, 36 nt, Clostridium cellulolyticum
  source 1..36: mol_type = other RNA
attatagcatatcggagcctgaattggagctataac

SEQ ID NO: 1041 - RNA, 36 nt, Acidovorax ebreus; identical to SEQ ID NO: 987
  source 1..36: mol_type = other RNA

SEQ ID NO: 1042 - RNA, 36 nt, Neisseria meningitidis; identical to SEQ ID NO: 975
  source 1..36: mol_type = other RNA

SEQ ID NO: 1043 - RNA, 36 nt, Pasteurella multocida; identical to SEQ ID NO: 966
  source 1..36: mol_type = other RNA

SEQ ID NO: 1044 - RNA, 36 nt, phylotype Rs-D17
  source 1..36: mol_type = other RNA
gttatagtttccttcctctctcagatgtgctataat

SEQ ID NO: 1045 - RNA, 36 nt, Wolinella succinogenes; identical to SEQ ID NO: 988
  source 1..36: mol_type = other RNA

SEQ ID NO: 1046 - RNA, 36 nt, Campylobacter jejuni; identical to SEQ ID NO: 994
  source 1..36: mol_type = other RNA

SEQ ID NO: 1047 - RNA, 36 nt, Campylobacter jejuni; identical to SEQ ID NO: 994
  source 1..36: mol_type = other RNA

SEQ ID NO: 1048 - RNA, 36 nt, Helicobacter mustelae
  source 1..36: mol_type = other RNA
attttagcataaacatatttatgaagtggctaaaac

SEQ ID NO: 1049 - RNA, 36 nt, Roseburia intestinalis
  source 1..36: mol_type = other RNA
attataccataccaagtgataacagggaattacaac

SEQ ID NO: 1050 - RNA, 36 nt, Lactobacillus coryniformis
  source 1..36: mol_type = other RNA
gatctattttagctgaaaactgaaggaatcaatagc

SEQ ID NO: 1051 - RNA, 36 nt, Rhodopseudomonas palustris; identical to SEQ ID NO: 996
  source 1..36: mol_type = other RNA

SEQ ID NO: 1052 - RNA, 36 nt, Cand. Puniceispirillum marinum
  source 1..36: mol_type = other RNA
agtatagcactctggtgattgagagcctagagcaac

SEQ ID NO: 1053 - RNA, 36 nt, Verminephrobacter eiseniae; identical to SEQ ID NO: 1001
  source 1..36: mol_type = other RNA

SEQ ID NO: 1054 - RNA, 36 nt, Ralstonia syzygii
  source 1..36: mol_type = other RNA
aggttagcagatcgggaattgcgctctggctacaac

SEQ ID NO: 1055 - RNA, 36 nt, Azospirillum B510
  source 1..36: mol_type = other RNA
agtgtagccgatggggatcgggggtccagccgcaac

SEQ ID NO: 1056 - RNA, 36 nt, Dinoroseobacter shibae; identical to SEQ ID NO: 1000
  source 1..36: mol_type = other RNA

SEQ ID NO: 1057 - RNA, 36 nt, Rhodospirillum rubrum; identical to SEQ ID NO: 998
  source 1..36: mol_type = other RNA

SEQ ID NO: 1058 - RNA, 36 nt, Rhodospirillum rubrum; identical to SEQ ID NO: 998
  source 1..36: mol_type = other RNA

SEQ ID NO: 1059 - RNA, 36 nt, Spirochaeta Buddy
  source 1..36: mol_type = other RNA
ggtcaatcttaacaaaaatcagcggtcatccccaac

SEQ ID NO: 1060 - RNA, 36 nt, Prevotella ruminicola; identical to SEQ ID NO: 991
  source 1..36: mol_type = other RNA

SEQ ID NO: 1061 - RNA, 36 nt, Flavobacterium columnare
  source 1..36: mol_type = other RNA
gttgtggtttgattaaagattagaaaacacgatatt

SEQ ID NO: 1062 - RNA, 36 nt, Parvibaculum lavamentivorans
  source 1..36: mol_type = other RNA
agagtagcaaatcgagagacggccgcaatccgcagc

SEQ ID NO: 1063 - RNA, 44 nt, Capnocytophaga ochracea; identical to SEQ ID NO: 986
  source 1..44: mol_type = other RNA

SEQ ID NO: 1064 - RNA, 48 nt, Fibrobacter succinogenes; identical to SEQ ID NO: 992
  source 1..48: mol_type = other RNA

SEQ ID NO: 1065 - RNA, 36 nt, Nitratifractor salsuginis; identical to SEQ ID NO: 982
  source 1..36: mol_type = other RNA

SEQ ID NO: 1066 - RNA, 36 nt, Akkermansia muciniphila
  source 1..36: mol_type = other RNA
gttgtactgtgccttattttggattcaaggcaaaac

SEQ ID NO: 1067 - RNA, 44 nt, synthetic construct
  misc_feature 1..44: note = synthetic sequence
  source 1..44: mol_type = other RNA
gttttagagctagaaatagcaagttaaaataaggctagtccgtt

SEQ ID NO: 1068 - RNA, 60 nt, synthetic construct
  misc_feature 1..60: note = synthetic sequence
  misc_feature 13..17: note = n is a, c, g, or u
  source 1..60: mol_type = other RNA
gttttagagctannnnntagcaagttaaaataagttaaaataaggctagtccgttatcaa

SEQ ID NO: 1069 - RNA, 68 nt, synthetic construct
  misc_feature 1..68: note = synthetic sequence
  source 1..68: mol_type = other RNA
gttttagagctatgctgaaaagcatagcaagttaaaaataagttaaaataaggctagtccgttatcaa

SEQ ID NO: 1070 - RNA, 69 nt, synthetic construct
  misc_feature 1..69: note = synthetic sequence
  source 1..69: mol_type = other RNA
gttttagagctatgctgttttggaaacaaaacagcatagcaagttaaaataaggctagtccgttatcaa

SEQ ID NO: 1071 - RNA, 70 nt, synthetic construct
  misc_feature 1..70: note = synthetic sequence
  source 1..70: mol_type = other RNA
gttttagagctagttttagagctagaaatagcaagttaaaattagcaagttaaaataaggctagtccgtt

SEQ ID NO: 1072 - RNA, 70 nt, synthetic construct
  misc_feature 1..70: note = synthetic sequence
  source 1..70: mol_type = other RNA
gttttagagctatagcaagttaaaatgaaagttttagagctatagcaagttaaaataaggctagtccgtt

SEQ ID NO: 1073 - RNA, 74 nt, synthetic construct
  misc_feature 1..74: note = synthetic sequence
  source 1..74: mol_type = other RNA
gttttagagctagaaatagcaagttaaaatgttttagagctagaaatagcaagttaaaataaggctagtccgtt

SEQ ID NO: 1074 - RNA, 119 nt, synthetic construct
  misc_feature 1..119: note = synthetic sequence
  source 1..119: mol_type = other RNA
gttttagagctatgctgttttggaaacaaaacagcatagcaagttaaaatgttttagagctatgctgttttggaaacaaaacagcatagcaagttaaaataaggctagtccgttatcaa

SEQ ID NO: 1075 - RNA, 12 nt, synthetic construct
  misc_feature 1..12: note = synthetic sequence
  source 1..12: mol_type = other RNA
gttttagagcta

SEQ ID NO: 1076 - protein, 11 aa, synthetic construct
  REGION 1..11: note = synthetic sequence
YGRKKRRQRRR

SEQ ID NO: 1077 - protein, 12 aa, synthetic construct
  REGION 1..12: note = synthetic sequence
RRQRRTSKLMKR

SEQ ID NO: 1078 - protein, 27 aa, synthetic construct
  REGION 1..27: note = synthetic sequence
GWTLNSAGYLLGKINLKALAALAKKIL

SEQ ID NO: 1079 - protein, 33 aa, synthetic construct
  REGION 1..33: note = synthetic sequence
KALAWEAKLAKALAKALAKHLAKALAKALKCEA

SEQ ID NO: 1080 - protein, 16 aa, synthetic construct
  REGION 1..16: note = synthetic sequence
RQIKIWFQNRRMKWKK

SEQ ID NO: 1081 - protein, 11 aa, synthetic construct
  REGION 1..11: note = synthetic sequence
YGRKKRRQRRR

SEQ ID NO: 1082 - protein, 9 aa, synthetic construct
  REGION 1..9: note = synthetic sequence
RKKRRQRRR

SEQ ID NO: 1083 - protein, 11 aa, synthetic construct
  REGION 1..11: note = synthetic sequence
YGRKKRRQRRR

SEQ ID NO: 1084 - protein, 8 aa, synthetic construct
  REGION 1..8: note = synthetic sequence
RKKRRQRR

SEQ ID NO: 1085 - protein, 11 aa, synthetic construct
  REGION 1..11: note = synthetic sequence
YARAAARQARA

SEQ ID NO: 1086 - protein, 11 aa, synthetic construct
  REGION 1..11: note = synthetic sequence
THRLPRRRRRR

SEQ ID NO: 1087 - protein, 11 aa, synthetic construct
  REGION 1..11: note = synthetic sequence
GGRRARRRRRR

SEQ ID NO: 1088 - protein, 1300 aa, Francisellatularensis
MSIYQEFVNKYSLSKTLRFELIPQGKTLENIKARGLILDDEKRAKDYKKAKQIIDKYHQFFIEEILSSVCISEDLLQNYSDVYFKLKKSDDDNLQKDFKSAKDTIKKQISEYIKDSEKFKNLFNQNLIDAKKGQESDLILWLKQSKDNGIELFKANSDITDIDEALEIIKSFKGWTTYFKGFHENRKNVYSSNDIPTSIIYRIVDDNLPKFLENKAKYESLKDKAPEAINYEQIKKDLAEELTFDIDYKTSEVNQRVFSLDEVFEIANFNNYLNQSGITKFNTIIGGKFVNGENTKRKGINEYINLYSQQINDKTLKKYKMSVLFKQILSDTESKSFVIDKLEDDSDVVTTMQSFYEQIAAFKTVEEKSIKETLSLLFDDLKAQKLDLSKIYFKNDKSLTDLSQQVFDDYSVIGTAVLEYITQQIAPKNLDNPSKKEQELIAKKTEKAKYLSLETIKLALEEFNKHRDIDKQCRFEEILANFAAIPMIFDEIAQNKDNLAQISIKYQNQGKKDLLQASAEDDVKAIKDLLDQTNNLLHKLKIFHISQSEDKANILDKDEHFYLVFEECYFELANIVPLYNKIRNYITQKPYSDEKFKLNFENSTLANGWDKNKEPDNTAILFIKDDKYYLGVMNKKNNKIFDDKAIKENKGEGYKKIVYKLLPGANKMLPKVFFSAKSIKFYNPSEDILRIRNHSTHTKNGSPQKGYEKFEFNIEDCRKFIDFYKQSISKHPEWKDFGFRFSDTQRYNSIDEFYREVENQGYKLTFENISESYIDSVVNQGKLYLFQIYNKDFSAYSKGRPNLHTLYWKALFDERNLQDVVYKLNGEAELFYRKQSIPKKITHPAKEAIANKNKDNPKKESVFEYDLIKDKRFTEDKFFFHCPITINFKSSGANKFNDEINLLLKEKANDVHILSIDRGERHLAYYTLVDGKGNIIKQDTFNIIGNDRMKTNYHDKLAAIEKDRDSARKDWKKINNIKEMKEGYLSQVVHEIAKLVIEYNAIVVFEDLNFGFKRGRFKVEKQVYQKLEKMLIEKLNYLVFKDNEFDKTGGVLRAYQLTAPFETFKKMGKQTGIIYYVPAGFTSKICPVTGFVNQLYPKYESVSKSQEFFSKFDKICYNLDKGYFEFSFDYKNFGDKAAKGKWTIASFGSRLINFRNSDKNHNWDTREVYPTKELEKLLKDYSIEYGHGECIKAAICGESDKKFFAKLTSVLNTILQMRNSKTGTELDYLISPVADVNGNFFDSRQAPKNMPQDADANGAYHIGLKGLMLLGRIKNNQEGKKLNLVIKNEEYFEFVQNRNN

SEQ ID NO: 1089 - protein, 1307 aa, unidentified
  REGION 1..1307: note = synthetic sequence
MTQFEGFTNLYQVSKTLRFELIPQGKTLKHIQEQGFIEEDKARNDHYKELKPIIDRIYKTYADQCLQLVQLDWENLSAAIDSYRKEKTEETRNALIEEQATYRNAIHDYFIGRTDNLTDAINKRHAEIYKGLFKAELFNGKVLKQLGTVTTTEHENALLRSFDKFTTYFSGFYENRKNVFSAEDISTAIPHRIVQDNFPKFKENCHIFTRLITAVPSLREHFENVKKAIGIFVSTSIEEVFSFPFYNQLLTQTQIDLYNQLLGGISREAGTEKIKGLNEVLNLAIQKNDETAHIIASLPHRFIPLFKQILSDRNTLSFILEEFKSDEEVIQSFCKYKTLLRNENVLETAEALFNELNSIDLTHIFISHKKLETISSALCDHWDTLRNALYERRISELTGKITKSAKEKVQRSLKHEDINLQEIISAAGKELSEAFKQKTSEILSHAHAALDQPLPTTLKKQEEKEILKSQLDSLLGLYHLLDWFAVDESNEVDPEFSARLTGIKLEMEPSLSFYNKARNYATKKPYSVEKFKLNFQMPTLASGWDVNKEKNNGAILFVKNGLYYLGIMPKQKGRYKALSFEPTEKTSEGFDKMYYDYFPDAAKMIPKCSTQLKAVTAHFQTHTTPILLSNNFIEPLEITKEIYDLNNPEKEPKKFQTAYAKKTGDQKGYREALCKWIDFTRDFLSKYTKTTSIDLSSLRPSSQYKDLGEYYAELNPLLYHISFQRIAEKEIMDAVETGKLYLFQIYNKDFAKGHHGKPNLHTLYWTGLFSPENLAKTSIKLNGQAELFYRPKSRMKRMAHRLGEKMLNKKLKDQKTPIPDTLYQELYDYVNHRLSHDLSDEARALLPNVITKEVSHEIIKDRRFTSDKFFFHVPITLNYQAANSPSKFNQRVNAYLKEHPETPIIGIDRGERNLIYITVIDSTGKILEQRSLNTIQQFDYQKKLDNREKERVAARQAWSVVGTIKDLKQGYLSQVIHEIVDLMIHYQAVVVLENLNFGFKSKRTGIAEKAVYQQFEKMLIDKLNCLVLKDYPAEKVGGVLNPYQLTDQFTSFAKMGTQSGFLFYVPAPYTSKIDPLTGFVDPFVWKTIKNHESRKHFLEGFDFLHYDVKTGDFILHFKMNRNLSFQRGLPGFMPAWDIVFEKNETQFDAKGTPFIAGKRIVPVIENHRFTGRYRDLYPANELIALLEEKGIVFRDGSNILPKLLENDDSHAIDTMVALIRSVLQMRNSNAATGEDYINSPVRDLNGVCFDSRFQNPEWPMDADANGAYHIALKGQLLLNHLKESKDLKLQNGISNQDWLAYIQELRN

SEQ ID NO: 1090 - protein, 1246 aa, unidentified
  REGION 1..1246: note = synthetic sequence
MLKNVGIDRLDVEKGRKNMSKLEKFTNCYSLSKTLRFKAIPVGKTQENIDNKRLLVEDEKRAEDYKGVKKLLDRYYLSFINDVLHSIKLKNLNNYISLFRKKTRTEKENKELENLEINLRKEIAKAFKGNEGYKSLFKKDIIETILPEFLDDKDEIALVNSFNGFTTAFTGFFDNRENMFSEEAKSTSIAFRCINENLTRYISNMDIFEKVDAIFDKHEVQEIKEKILNSDYDVEDFFEGEFFNFVLTQEGIDVYNAIIGGFVTESGEKIKGLNEYINLYNQKTKQKLPKFKPLYKQVLSDRESLSFYGEGYTSDEEVLEVFRNTLNKNSEIFSSIKKLEKLFKNFDEYSSAGIFVKNGPAISTISKDIFGEWNVIRDKWNAEYDDIHLKKKAVVTEKYEDDRRKSFKKIGSFSLEQLQEYADADLSVVEKLKEIIIQKVDEIYKVYGSSEKLFDADFVLEKSLKKNDAVVAIMKDLLDSVKSFENYIKAFFGEGKETNRDESFYGDFVLAYDILLKVDHIYDAIRNYVTQKPYSKDKFKLYFQNPQFMGGWDKDKETDYRATILRYGSKYYLAIMDKKYAKCLQKIDKDDVNGNYEKINYKLLPGPNKMLPKVFFSKKWMAYYNPSEDIQKIYKNGTFKKGDMFNLNDCHKLIDFFKDSISRYPKWSNAYDFNFSETEKYKDIAGFYREVEEQGYKVSFESASKKEVDKLVEEGKLYMFQIYNKDFSDKSHGTPNLHTMYFKLLFDENNHGQIRLSGGAELFMRRASLKKEELVVHPANSPIANKNPDNPKKTTTLSYDVYKDKRFSEDQYELHIPIAINKCPKNIFKINTEVRVLLKHDDNPYVIGIDRGERNLLYIVVVDGKGNIVEQYSLNEIINNFNGIRIKTDYHSLLDKKEKERFEARQNWTSIENIKELKAGYISQVVHKICELVEKYDAVIALEDLNSGFKNSRVKVEKQVYQKFEKMLIDKLNYMVDKKSNPCATGGALKGYQITNKFESFKSMSTQNGFIFYIPAWLTSKIDPSTGFVNLLKTKYTSIADSKKFISSFDRIMYVPEEDLFEFALDYKNFSRTDADYIKKWKLYSYGNRIRIFRNPKKNNVFDWEEVCLTSAYKELFNKYGINYQQGDIRALLCEQSDKAFYSSFMALMSLMLQMRNSITGRTDVDFLISPVKNSDGIFYDSRNYEAQENAILPKNADANGAYNIARKVLWAIGQFKKAEDEKLDKVKIAISNKEWLEYAQTSVKH

SEQ ID NO: 1091 - protein, 1246 aa, Porphyromonas macacae
MKTQHFFEDFTSLYSLSKTIRFELKPIGKTLENIKKNGLIRRDEQRLDDYEKLKKVIDEYHEDFIANILSSFSFSEEILQSYIQNLSESEARAKIEKTMRDTLAKAFSEDERYKSIFKKELVKKDIPVWCPAYKSLCKKFDNFTTSLVPFHENRKNLYTSNEITASIPYRIVHVNLPKFIQNIEALCELQKKMGADLYLEMMENLRNVWPSFVKTPDDLCNLKTYNHLMVQSSISEYNRFVGGYSTEDGTKHQGINEWINIYRQRNKEMRLPGLVFLHKQILAKVDSSSFISDTLENDDQVFCVLRQFRKLFWNTVSSKEDDAASLKDLFCGLSGYDPEAIYVSDAHLATISKNIFDRWNYISDAIRRKTEVLMPRKKESVERYAEKISKQIKKRQSYSLAELDDLLAHYSEESLPAGFSLLSYFTSLGGQKYLVSDGEVILYEEGSNIWDEVLIAFRDLQVILDKDFTEKKLGKDEEAVSVIKKALDSALRLRKFFDLLSGTGAEIRRDSSFYALYTDRMDKLKGLLKMYDKVRNYLTKKPYSIEKFKLHFDNPSLLSGWDKNKELNNLSVIFRQNGYYYLGIMTPKGKNLFKTLPKLGAEEMFYEKMEYKQIAEPMLMLPKVFFPKKTKPAFAPDQSVVDIYNKKTFKTGQKGFNKKDLYRLIDFYKEALTVHEWKLFNFSFSPTEQYRNIGEFFDEVREQAYKVSMVNVPASYIDEAVENGKLYLFQIYNKDFSPYSKGIPNLHTLYWKALFSEQNQSRVYKLCGGGELFYRKASLHMQDTTVHPKGISIHKKNLNKKGETSLFNYDLVKDKRFTEDKFFFHVPISINYKNKKITNVNQMVRDYIAQNDDLQIIGIDRGERNLLYISRIDTRGNLLEQFSLNVIESDKGDLRTDYQKILGDREQERLRRRQEWKSIESIKDLKDGYMSQVVHKICNMVVEHKAIVVLENLNLSFMKGRKKVEKSVYEKFERMLVDKLNYLVVDKKNLSNEPGGLYAAYQLTNPLFSFEELHRYPQSGILFFVDPWNTSLTDPSTGFVNLLGRINYTNVGDARKFFDRFNAIRYDGKGNILFDLDLSRFDVRVETQRKLWTLTTFGSRIAKSKKSGKWMVERIENLSLCFLELFEQFNIGYRVEKDLKKAILSQDRKEFYVRLIYLFNLMMQIRNSDGEEDYILSPALNEKNLQFDSRLIEAKDLPVDADANGAYNVARKGLMVVQRIKRGDHESIHRIGRAQWLRYVQEGIVE

SEQ ID NO: 1092 - protein, 1326 aa, Prevotelladisiens
MKVMENYQEFTNLFQLNKTLRFELKPIGKTCELLEEGKIFASGSFLEKDKVRADNVSYVKKEIDKKHKIFIEETLSSFSISNDLLKQYFDCYNELKAFKKDCKSDEEEVKKTALRNKCTSIQRAMREAISQAFLKSPQKKLLAIKNLIENVFKADENVQHFSEFTSYFSGFETNRENFYSDEEKSTSIAYRLVHDNLPIFIKNIYIFEKLKEQFDAKTLSEIFENYKLYVAGSSLDEVFSLEYFNNTLTQKGIDNYNAVIGKIVKEDKQEIQGLNEHINLYNQKHKDRRLPFFISLKKQILSDREALSWLPDMFKNDSEVIKALKGFYIEDGFENNVLTPLATLLSSLDKYNLNGIFIRNNEALSSLSQNVYRNFSIDEAIDANAELQTFNNYELIANALRAKIKKETKQGRKSFEKYEEYIDKKVKAIDSLSIQEINELVENYVSEFNSNSGNMPRKVEDYFSLMRKGDFGSNDLIENIKTKLSAAEKLLGTKYQETAKDIFKKDENSKLIKELLDATKQFQHFIKPLLGTGEEADRDLVFYGDFLPLYEKFEELTLLYNKVRNRLTQKPYSKDKIRLCFNKPKLMTGWVDSKTEKSDNGTQYGGYLFRKKNEIGEYDYFLGISSKAQLFRKNEAVIGDYERLDYYQPKANTIYGSAYEGENSYKEDKKRLNKVIIAYIEQIKQTNIKKSIIESISKYPNISDDDKVTPSSLLEKIKKVSIDSYNGILSFKSFQSVNKEVIDNLLKTISPLKNKAEFLDLINKDYQIFTEVQAVIDEICKQKTFIYFPISNVELEKEMGDKDKPLCLFQISNKDLSFAKTFSANLRKKRGAENLHTMLFKALMEGNQDNLDLGSGAIFYRAKSLDGNKPTHPANEAIKCRNVANKDKVSLFTYDIYKNRRYMENKFLFHLSIVQNYKAANDSAQLNSSATEYIRKADDLHIIGIDRGERNLLYYSVIDMKGNIVEQDSLNIIRNNDLETDYHDLLDKREKERKANRQNWEAVEGIKDLKKGYLSQAVHQIAQLMLKYNAIIALEDLGQMFVTRGQKIEKAVYQQFEKSLVDKLSYLVDKKRPYNELGGILKAYQLASSITKNNSDKQNGFLFYVPAWNTSKIDPVTGFTDLLRPKAMTIKEAQDFFGAFDNISYNDKGYFEFETNYDKFKIRMKSAQTRWTICTFGNRIKRKKDKNYWNYEEVELTEEFKKLFKDSNIDYENCNLKEEIQNKDNRKFFDDLIKLLQLTLQMRNSDDKGNDYIISPVANAEGQFFDSRNGDKKLPLDADANGAYNIARKGLWNIRQIKQTKNDKKLNLSISSTEWLDFVREKPYLK

SEQ ID NO: 1093 - RNA, 19 nt, synthetic construct
  misc_feature 1..19: note = synthetic sequence
  source 1..19: mol_type = other RNA
aatttctactgttgtagat

SEQ ID NO: 1094 - RNA, 19 nt, synthetic construct
  misc_feature 1..19: note = synthetic sequence
  source 1..19: mol_type = other RNA
aatttctgctgttgcagat

SEQ ID NO: 1095 - RNA, 19 nt, synthetic construct
  misc_feature 1..19: note = synthetic sequence
  source 1..19: mol_type = other RNA
aatttccactgttgtggat

SEQ ID NO: 1096 - RNA, 19 nt, synthetic construct
  misc_feature 1..19: note = synthetic sequence
  source 1..19: mol_type = other RNA
aattcctactgttgtaggt

SEQ ID NO: 1097 - RNA, 19 nt, synthetic construct
  misc_feature 1..19: note = synthetic sequence
  source 1..19: mol_type = other RNA
aatttctactattgtagat

SEQ ID NO: 1098 - RNA, 19 nt, synthetic construct
  misc_feature 1..19: note = synthetic sequence
  source 1..19: mol_type = other RNA
aatttctactgctgtagat

SEQ ID NO: 1099 - RNA, 18 nt, synthetic construct
  misc_feature 1..18: note = synthetic sequence
  source 1..18: mol_type = other RNA
aatttctactttgtagat

SEQ ID NO: 1100 - RNA, 17 nt, synthetic construct
  misc_feature 1..17: note = synthetic sequence
  source 1..17: mol_type = other RNA
aatttctacttgtagat

SEQ ID NO: 1101 - RNA, 67 nt, synthetic construct
  misc_feature 1..67: note = synthetic sequence
  source 1..67: mol_type = other RNA
gaatttttcaacgggtgtgccaatggccactttccaggtggcaaagcccgttgagcttctcaaaaag

SEQ ID NO: 1102 - RNA, 79 nt, synthetic construct
  misc_feature 1..79: note = synthetic sequence
  source 1..79: mol_type = other RNA
gtctagaggacagaatttttcaacgggtgtgccaatggccactttccaggtggcaaagcccgttgagcttctcaaaaag

SEQ ID NO: 1103 - RNA, 78 nt, synthetic construct
  misc_feature 1..78: note = synthetic sequence
  source 1..78: mol_type = other RNA
tctagaggacagaatttttcaacgggtgtgccaatggccactttccaggtggcaaagcccgttgagcttctcaaaaag

SEQ ID NO: 1104 - RNA, 36 nt, synthetic construct
  misc_feature 1..36: note = synthetic sequence
  source 1..36: mol_type = other RNA
actttccaggcaaagcccgttgagcttctcaaaaag

SEQ ID NO: 1105-1106 - skipped (2 entries)

SEQ ID NO: 1107 - RNA, 34 nt, synthetic construct
  misc_feature 1..34: note = synthetic sequence
  misc_feature 15..34: note = n is a, c, g, or u
  source 1..34: mol_type = other RNA
ctgagaagtggcacnnnnnnnnnnnnnnnnnnnn

SEQ ID NO: 1108 - RNA, 14 nt, synthetic construct
  misc_feature 1..14: note = synthetic sequence
  source 1..14: mol_type = other RNA
ctgagaagtggcac

SEQ ID NO: 1109 - skipped

SEQ ID NO: 1110 - RNA, 13 nt, synthetic construct
  misc_feature 1..13: note = synthetic sequence
  source 1..13: mol_type = other RNA
tgagaagtggcac

SEQ ID NO: 1111 - skipped

SEQ ID NO: 1112 - protein, 1129 aa, Alicyclobacillus acidoterrestris
MAVKSIKVKLRLDDMPEIRAGLWKLHKEVNAGVRYYTEWLSLLRQENLYRRSPNGDGEQECDKTAEECKAELLERLRARQVENGHRGPAGSDDELLQLARQLYELLVPQAIGAKGDAQQIARKFLSPLADKDAVGGLGIAKAGNKPRWVRMREAGEPGWEEEKEKAETRKSADRTADVLRALADFGLKPLMRVYTDSEMSSVEWKPLRKGQAVRTWDRDMFQQAIERMMSWESWNQRVGQEYAKLVEQKNRFEQKNFVGQEHLVHLVNQLQQDMKEASPGLESKEQTAHYVTGRALRGSDKVFEKWGKLAPDAPFDLYDAEIKNVQRRNTRRFGSHDLFAKLAEPEYQALWREDASFLTRYAVYNSILRKLNHAKMFATFTLPDATAHPIWTRFDKLGGNLHQYTFLFNEFGERRHAIRFHKLLKVENGVAREVDDVTVPISMSEQLDNLLPRDPNEPIALYFRDYGAEQHFTGEFGGAKIQCRRDQLAHMHRRRGARDVYLNVSVRVQSQSEARGERRPPYAAVFRLVGDNHRAFVHFDKLSDYLAEHPDDGKLGSEGLLSGLRVMSVDLGLRTSASISVFRVARKDELKPNSKGRVPFFFPIKGNDNLVAVHERSQLLKLPGETESKDLRAIREERQRTLRQLRTQLAYLRLLVRCGSEDVGRRERSWAKLIEQPVDAANHMTPDWREAFENELQKLKSLHGICSDKEWMDAVYESVRRVWRHMGKQVRDWRKDVRSGERPKIRGYAKDVVGGNSIEQIEYLERQYKFLKSWSFFGKVSGQVIRAEKGSRFAITLREHIDHAKEDRLKKLADRIIMEALGYVYALDERGKGKWVAKYPPCQLILLEELSEYQFNNDRPPSENNQLMQWSHRGVFQELINQAQVHDLLVGTMYAAFSSRFDARTGAPGIRCRRVPARCTQEHNPEPFPWWLNKFVVEHTLDACPLRADDLIPTGEGEIFVSPFSAEEGDFHQIHADLNAAQNLQQRLWSDFDISQIRLRCDWGEVDGELVLIPRLTGKRTADSYSNKVFYTNTGVTYYERERGKKRRKVFAQEKLSEEEAELLVEADEAREKSVVLMRDPSGIINRGNWTRQKEFWSMVNQRIEGYLVKQIRSRVPLQDSACENTGDI

SEQ ID NO: 1113 - protein, 872 aa, Alicyclobacillus contaminans
MGFNTAELLRKVEEEMRKTSVGFDTDNPFAHRITRRAIRGWDRIAEAWRRLPPDAPESEYIEAFKDIQRKNPRKIGSEPLFKNLAAPGVRSELLNNPQVLITFAKYNELQRQLAKAKQFAQKTLPHPVFHPVWVRYDKLGGNLHHYQIEPAVHANDTHKVKFSSLLLPQEDGSYAEVKDVTVSLAPSLQFPTGLVHPKVTTPPRTGLVTVMDEEAGKPVVCYRDRGHDALVPVAFGGAKLQFNRAHLSAGYRKGVLSAGGGGSIYFNVTLDVQVPNERDVSKTFSFSRDRDLVSLKAEELKRYMETKPLGMPGVRVMSVDLGVRYGAAISVFEVKPFAEVRKDKLHYPITGCEGFVAEHERSVILKLPGEGVRTAGKQSERKQALAAIRAEMSILRKWLRVSQVTEEDRAKAVRGLLEDERGGGWTMDPGEDSDHQPLQQFLHEARLAVGELVNLVHLSPAEWERAVIERHRRLERITASHIRVFQTMRKVWGKRRNEDAAHTGGISLAHIEHLIQQRKLFIRWSTHARTYGEVRRLPKHEGFAKRLQKHTNHVKEDRIKKLADMIVMAARGYRFLDKRARWVKTRHAPCDLILFEDLSRYRFTMDRPPTENSQLMNWSHRELLKTVKMQAALFGIGVGTVPAAFTSRFDAQTGAPGLRCKRVTKQDKEKTPFWLIQFAEITGVNVTNVEPGQLIPVDGGEWFVSPKGPRAADGLKCVHADINAAHNLQRRFWIPRLPSVKCRRYVEAEGFAAVPSSTAFMKVHGKGAFVSVDGEFYEYQKGRRVAVNRADRTSSTLDEDEGDIGEEMLVSSNGAGEFVRMFYDESGYVGYGRWMDSKVFWGKVRQIVHRAIQDQVEKRAAARGENGATSSR

SEQ ID NO: 1114 - protein, 1149 aa, Desulfovibrio inopinatus
MPTRTINLKLVLGKNPENATLRRALFSTHRLVNQATKRIEEFLLLCRGEAYRTVDNEGKEAEIPRHAVQEEALAFAKAAQRHNGCISTYEDQEILDVLRQLYERLVPSVNENNEAGDAQAANAWVSPLMSAESEGGLSVYDKVLDPPPVWMKLKEEKAPGWEAASQIWIQSDEGQSLLNKPGSPPRWIRKLRSGQPWQDDFVSDQKKKQDELTKGNAPLIKQLKEMGLLPLVNPFFRHLLDPEGKGVSPWDRLAVRAAVAHFISWESWNHRTRAEYNSLKLRRDEFEAASDEFKDDFTLLRQYEAKRHSTLKSIALADDSNPYRIGVRSLRAWNRVREEWIDKGATEEQRVTILSKLQTQLRGKFGDPDLFNWLAQDRHVHLWSPRDSVTPLVRINAVDKVLRRRKPYALMTFAHPRFHPRWILYEAPGGSNLRQYALDCTENALHITLPLLVDDAHGTWIEKKIRVPLAPSGQIQDLTLEKLEKKKNRLYYRSGFQQFAGLAGGAEVLFHRPYMEHDERSEESLLERPGAVWFKLTLDVATQAPPNWLDGKGRVRTPPEVHHFKTALSNKSKHTRTLQPGLRVLSVDLGMRTFASCSVFELIEGKPETGRAFPVADERSMDSPNKLWAKHERSFKLTLPGETPSRKEEEERSIARAEIYALKRDIQRLKSLLRLGEEDNDNRRDALLEQFFKGWGEEDVVPGQAFPRSLFQGLGAAPFRSTPELWRQHCQTYYDKAEACLAKHISDWRKRTRPRPTSREMWYKTRSYHGGKSIWMLEYLDAVRKLLLSWSLRGRTYGAINRQDTARFGSLASRLLHHINSLKEDRIKTGADSIVQAARGYIPLPHGKGWEQRYEPCQLILFEDLARYRFRVDRPRRENSQLMQWNHRAIVAETTMQAELYGQIVENTAAGFSSRFHAATGAPGVRCRFLLERDFDNDLPKPYLLRELSWMLGNTKVESEEEKLRLLSEKIRPGSLVPWDGGEQFATLHPKRQTLCVIHADMNAAQNLQRRFFGRCGEAFRLVCQPHGDDVLRLASTPGARLLGALQQLENGQGAFELVRDMGSTSQMNRFVMKSLGKKKIKPLQDNNGDDELEDVLSVLPEEDDTGRITVFRDSSGIFFPCNVWIPAKQFWPAVRAMIWKVMASHSLG

SEQ ID NO: 1115 - protein, 1194 aa, Desulfonatronum thiodismutans
MVLGRKDDTAELRRALWTTHEHVNLAVAEVERVLLRCRGRSYWTLDRRGDPVHVPESQVAEDALAMAREAQRRNGWPVVGEDEEILLALRYLYEQIVPSCLLDDLGKPLKGDAQKIGTNYAGPLFDSDTCRRDEGKDVACCGPFHEVAGKYLGALPEWATPISKQEFDGKDASHLRFKATGGDDAFFRVSIEKANAWYEDPANQDALKNKAYNKDDWKKEKDKGISSWAVKYIQKQLQLGQDPRTEVRRKLWLELGLLPLFIPVFDKTMVGNLWNRLAVRLALAHLLSWESWNHRAVQDQALARAKRDELAALFLGMEDGFAGLREYELRRNESIKQHAFEPVDRPYVVSGRALRSWTRVREEWLRHGDTQESRKNICNRLQDRLRGKFGDPDVFHWLAEDGQEALWKERDCVTSFSLLNDADGLLEKRKGYALMTFADARLHPRWAMYEAPGGSNLRTYQIRKTENGLWADVVLLSPRNESAAVEEKTFNVRLAPSGQLSNVSFDQIQKGSKMVGRCRYQSANQQFEGLLGGAEILFDRKRIANEQHGATDLASKPGHVWFKLTLDVRPQAPQGWLDGKGRPALPPEAKHFKTALSNKSKFADQVRPGLRVLSVDLGVRSFAACSVFELVRGGPDQGTYFPAADGRTVDDPEKLWAKHERSFKITLPGENPSRKEEIARRAAMEELRSLNGDIRRLKAILRLSVLQEDDPRTEHLRLFMEAIVDDPAKSALNAELFKGFGDDRFRSTPDLWKQHCHFFHDKAEKVVAERFSRWRTETRPKSSSWQDWRERRGYAGGKSYWAVTYLEAVRGLILRWNMRGRTYGEVNRQDKKQFGTVASALLHHINQLKEDRIKTGADMIIQAARGFVPRKNGAGWVQVHEPCRLILFEDLARYRFRTDRSRRENSRLMRWSHREIVNEVGMQGELYGLHVDTTEAGFSSRYLASSGAPGVRCRHLVEEDFHDGLPGMHLVGELDWLLPKDKDRTANEARRLLGGMVRPGMLVPWDGGELFATLNAASQLHVIHADINAAQNLQRRFWGRCGEAIRIVCNQLSVDGSTRYEMAKAPKARLLGALQQLKNGDAPFHLTSIPNSQKPENSYVMTPTNAGKKYRAGPGEKSSGEEDELALDIVEQAEELAQGRKTFFRDPSGVFFAPDRWLPSEIYWSRIRRRIWQVTLERNSSGRQERAEMDEMPY

SEQ ID NO: 1116 - protein, 1132 aa, Tuberibacillus calidus
MATKSFILKMKTKNNPQLRLSLWKTHELFNFGVAYYMDLLSLFRQKDLYMHNDEDPDHPVVLKKEEIQERLWMKVRETQQKNGFHGEVSKDEVLETLRALYEELVPSAVGKSGEANQISNKYLYPLTDPASQSGKGTANSGRKPRWKKLKEAGDPSWKDAYEKWEKERQEDPKLKILAALQSFGLIPLFRPFTENDHKAVISVKWMPKSKNQSVRKFDKDMFNQAIERFLSWESWNEKVAEDYEKTVSIYESLQKELKGISTKAFEIMERVEKAYEAHLREITFSNSTYRIGNRAIRGWTEIVKKWMKLDPSAPQGNYLDVVKDYQRRHPRESGDFKLFELLSRPENQAAWREYPEFLPLYVKYRHAEQRMKTAKKQATFTLCDPIRHPLWVRYEERSGTNLNKYRLIMNEKEKVVQFDRLICLNADGHYEEQEDVTVPLAPSQQFDDQIKFSSEDTGKGKHNFSYYHKGINYELKGTLGGARIQFDREHLLRRQGVKAGNVGRIFLNVTLNIEPMQPFSRSGNLQTSVGKALKVYVDGYPKVVNFKPKELTEHIKESEKNTLTLGVESLPTGLRVMSVDLGQRQAAAISIFEVVSEKPDDNKLFYPVKDTDLFAVHRTSFNIKLPGEKRTERRMLEQQKRDQAIRDLSRKLKFLKNVLNMQKLEKTDEREKRVNRWIKDREREEENPVYVQEFEMISKVLYSPHSVWVDQLKSIHRKLEEQLGKEISKWRQSISQGRQGVYGISLKNIEDIEKTRRLLFRWSMRPENPGEVKQLQPGERFAIDQQNHLNHLKDDRIKKLANQIVMTALGYRYDGKRKKWIAKHPACQLVLFEDLSRYAFYDERSRLENRNLMRWSRREIPKQVAQIGGLYGLLVGEVGAQYSSRFHAKSGAPGIRCRVVKEHELYITEGGQKVRNQKFLDSLVENNIIEPDDARRLEPGDLIRDQGGDKFATLDERGELVITHADINAAQNLQKRFWTRTHGLYRIRCESREIKDAVVLVPSDKDQKEKMENLFGIGYLQPFKQENDVYKWVKGEKIKGKKTSSQSDDKELVSEILQEASVMADELKGNRKTLFRDPSGYVFPKDRWYTGGRYFGTLEHLLKRKLAERRLFDGGSSRRGLFNGTDSNTNVE

SEQ ID NO: 1117 - protein, 1108 aa, Bacillus thermoamylovorans
MATRSFILKIEPNEEVKKGLWKTHEVLNHGIAYYMNILKLIRQEAIYEHHEQDPKNPKKVSKAEIQAELWDFVLKMQKCNSFTHEVDKDVVFNILRELYEELVPSSVEKKGEANQLSNKFLYPLVDPNSQSGKGTASSGRKPRWYNLKIAGDPSWEEEKKKWEEDKKKDPLAKILGKLAEYGLIPLFIPFTDSNEPIVKEIKWMEKSRNQSVRRLDKDMFIQALERFLSWESWNLKVKEEYEKVEKEHKTLEERIKEDIQAFKSLEQYEKERQEQLLRDTLNTNEYRLSKRGLRGWREIIQKWLKMDENEPSEKYLEVFKDYQRKHPREAGDYSVYEFLSKKENHFIWRNHPEYPYLYATFCEIDKKKKDAKQQATFTLADPINHPLWVRFEERSGSNLNKYRILTEQLHTEKLKKKLTVQLDRLIYPTESGGWEEKGKVDIVLLPSRQFYNQIFLDIEEKGKHAFTYKDESIKFPLKGTLGGARVQFDRDHLRRYPHKVESGNVGRIYFNMTVNIEPTESPVSKSLKIHRDDFPKFVNFKPKELTEWIKDSKGKKLKSGIESLEIGLRVMSIDLGQRQAAAASIFEVVDQKPDIEGKLFFPIKGTELYAVHRASFNIKLPGETLVKSREVLRKAREDNLKLMNQKLNFLRNVLHFQQFEDITEREKRVTKWISRQENSDVPLVYQDELIQIRELMYKPYKDWVAFLKQLHKRLEVEIGKEVKHWRKSLSDGRKGLYGISLKNIDEIDRTRKFLLRWSLRPTEPGEVRRLEPGQRFAIDQLNHLNALKEDRLKKMANTIIMHALGYCYDVRKKKWQAKNPACQIILFEDLSNYNPYEERSRFENSKLMKWSRREIPRQVALQGEIYGLQVGEVGAQFSSRFHAKTGSPGIRCSVVTKEKLQDNRFFKNLQREGRLTLDKIAVLKEGDLYPDKGGEKFISLSKDRKLVTTHADINAAQNLQKRFWTRTHGFYKVYCKAYQVDGQTVYIPESKDQKQKIIEEFGEGYFILKDGVYEWGNAGKLKIKKGSSKQSSSELVDSDILKDSFDLASELKGEKLMLYRDPSGNVFPSDKWMAAGVFFGKLERILISKLTNQYSISTIEDDSSKQSM

SEQ ID NO: 1118 - protein, 1108 aa, unidentified
  REGION 1..1108: note = synthetic sequence
MAIRSIKLKLKTHTGPEAQNLRKGIWRTHRLLNEGVAYYMKMLLLFRQESTGERPKEELQEELICHIREQQQRNQADKNTQALPLDKALEALRQLYELLVPSSVGQSGDAQIISRKFLSPLVDPNSEGGKGTSKAGAKPTWQKKKEANDPTWEQDYEKWKKRREEDPTASVITTLEEYGIRPIFPLYTNTVTDIAWLPLQSNQFVRTWDRDMLQQAIERLLSWESWNKRVQEEYAKLKEKMAQLNEQLEGGQEWISLLEQYEENRERELRENMTAANDKYRITKRQMKGWNELYELWSTFPASASHEQYKEALKRVQQRLRGRFGDAHFFQYLMEEKNRLIWKGNPQRIHYFVARNELTKRLEEAKQSATMTLPNARKHPLWVRFDARGGNLQDYYLTAEADKPRSRRFVTFSQLIWPSESGWMEKKDVEVELALSRQFYQQVKLLKNDKGKQKIEFKDKGSGSTFNGHLGGAKLQLERGDLEKEEKNFEDGEIGSVYLNVVIDFEPLQEVKNGRVQAPYGQVLQLIRRPNEFPKVTTYKSEQLVEWIKASPQHSAGVESLASGFRVMSIDLGLRAAAATSIFSVEESSDKNAADFSYWIEGTPLVAVHQRSYMLRLPGEQVEKQVMEKRDERFQLHQRVKFQIRVLAQIMRMANKQYGDRWDELDSLKQAVEQKKSPLDQTDRTFWEGIVCDLTKVLPRNEADWEQAVVQIHRKAEEYVGKAVQAWRKRFAADERKGIAGLSMWNIEELEGLRKLLISWSRRTRNPQEVNRFERGHTSHQRLLTHIQNVKEDRLKQLSHAIVMTALGYVYDERKQEWCAEYPACQVILFENLSQYRSNLDRSTKENSTLMKWAHRSIPKYVHMQAEPYGIQIGDVRAEYSSRFYAKTGTPGIRCKKVRGQDLQGRRFENLQKRLVNEQFLTEEQVKQLRPGDIVPDDSGELFMTLTDGSGSKEVVFLQADINAAHNLQKRFWQRYNELFKVSCRVIVRDEEEYLVPKTKSVQAKLGKGLFVKKSDTAWKDVYVWDSQAKLKGKTTFTEESESPEQLEDFQEIIEEAEEAKGTYRTLFRDPSGVFFPESVWYPQKDFWGEVKRKLYGKLRERFLTKAR

SEQ ID NO: 1119 - protein, 658 aa, Methylobacterium nodulans
MLTKQDKQQKITYCTNMNEVFEAKLGSADLLLNWDHLRGRIRDRVDAGDIGSAFLKLALDVAHVLPDGVDDQLARAAFHFQSAKGAKSKHADSVQAGLRVLSIDLGVRSFATCSVFELKDTAPTTGVAFPLAEFRLWAVHERSFTLELPGENVGAAGQQWRAQADAELRQLRGGLNRHRQLLRAATVQKGERDAYLTDLREAWSAKELWPFEASLLSELERCSTVADPLWQDTCKRAARLYRTEFGAVVSEWRSRTRSREDRKYAGKSMWSVQHLTDVRRFLQSWSLAGRASGDIRRLDRERGGVFAKDLLDHIDALKDDRLKTGADLIVQAARGFQRNEFGYWVQKHAPCHVILFEDLSRYRMRTDRPRRENSQLMQWAHRGVPDMVGMQGEIYGIQDRRDPDSARKHARQPLAAFCLDTPAAFSSRYHASTMTPGIRCHPLRKREFEDQGFLELLKRENEGLDLNGYKPGDLVPLPGGEVFVCLNANGLSRIHADINAAQNLQRRFWTQHGDAFRLPCGKSAVQGQIRWAPLSMGKRQAGALGGFGYLEPTGHDSGSCQWRKTTEAEWRRLSGAQKDRDEAAAAEDEELQGLEEELLERSGERVVFFRDPSGVVLPTDLWFPSAAFWSIVRAKTVGRLRSHLDAQAEASYAVAAGL

SEQ ID NO: 1120 - protein, 1302 aa, unidentified
  REGION 1..1302: note = synthetic sequence
MKKFELKQNFRNNYSGKTLRNFRQTLAQIANKKSSDSILTIKFKLDCSKTGKLPKYENLISLYDTIEDIKKGTLSYYLFTLIVSGFKFFGSASQAKAFSTKDIFKDNDFYNQFKIQSHLDLPDFVPSKIYQRLKKNVRSTNGKDNAFKASVIVAEYRKEIGKLKNKDESSEHQCEELFKKIGTALETRFSSWQDLINNCSTGCEIIDEILNDSFGTLPSIKKMVLASTTQSSDGEQDGIAIAYDPDSTFIKSDELLNPYFAVATILKSMPPEIQQDKKSAYVKANLTTPTHNALSWIFGKGLTLFQTESTEKLCAMFNVSDKRVIEQVQDAAKAVKLPAELDLNHCTLKFQDFRSSLGGHLDSWTTNYLKRLDELNDLLLNLPKNLSLPDIFMIDGKDFIEYSGCNRDEIQQMIDFVVNEQNRIKLQESLNALLGKGNNQICSDDISTVKDFSEIVNSLHSFVQQIDNSLEQSSNEANSIFSELKKKIEKNEKWDIWKNNLKKIPKLNKLSGGVPDAWKEIREIEQKFHEISENQKKHFTEVMEWIDAGNGTIDIFESRFKYDELLKKSKKNNLQSADELAFRSVLNKLGRFARQGNDLVCEKIKNWFKEQNIFDSSKDFNRYFINQKGFIFKHPSSKKDNSPYNLSANLLEKRYEVTNTVGALLEQCESDPAIVNDPFSMRSLVEFRALWFSINISGISKEQHIPTKIAQPKLDDSTYQESVSPTLKYRLEKEQITSSELNSIFTVYKSLLSGLSIRLSRNSFYLRTKFSWIGNNSLIYCPKETTWKIPAAYFKSDLWNEYKDKQILIVNEEYDVDVVKTFESVYKIVKSKDNNEKNRILPLLKQLPHDWMFKLPFGASNAEKCKVLKLEKNNKKFKPLSVSKDSLARLSGPSTYFNQIDEIMMNDESELSEMTLLADEPVRQQMSNGKIEIIPDDYVMSLAIPITRSLKKGNTESFPFKNIVSIDQGEAGFAYAVFKLSDCGNERAEPIATGLIPIPSIRRLIHSVKKYRGKKQRIQNFNQKFDSTMFTLRENVTGDICGLIVALMKKYNAFPILEKQVGNLESGSKQLMLVYKAVNSKFLAAKVDMQNDQRRSWWYQGNSWNTPILRISNPNQSNNKNIVKNINGKKYEELKIYPGYSVSAYMTSCICHVCGRNALELLKNDDSTGKVKKYQINQDGEVTIGGEVIKLYRKPDRLTPVKNLAKKGNRERTYASINERAPTVSVQKAELSADELQKIIKKNMRRAPRSLMSKDTTQSRYFCVFKNCPCHNKEQHADVNAAINIGRRFLKDCILDDNKEKD

SEQ ID NO: 1121 - protein, 1255 aa, unidentified
  REGION 1..1255: note = synthetic sequence
MRSNYHGGRNARQWRKQISGLARRTKETVFTYKFPLETDAAEIDFDKAVQTYGIAEGVGHGSLIGLVCAFHLSGFRLFSKAGEAMAFRNRSRYPTDAFAEKLSAIMGIQLPTLSPEGLDLIFQSPPRSRDGIAPVWSENEVRNRLYTNWTGRGPANKPDEHLLEIAGEIAKQVFPKFGGWDDLASDPDKALAAADKYFQSQGDFPSIASLPAAIMLSPANSTVDFEGDYIAIDPAAETLLHQAVSRCAARLGRERPDLDQNKGPFVSSLQDALVSSQNNGLSWLFGVGFQHWKEKSPKELIDEYKVPADQHGAVTQVKSFVDAIPLNPLFDTTHYGEFRASVAGKVRSWVANYWKRLLDLKSLLATTEFTLPESISDPKAVSLFSGLLVDPQGLKKVADSLPARLVSAEEAIDRLMGVGIPTAADIAQVERVADEIGAFIGQVQQFNNQVKQKLENLQDADDEEFLKGLKIELPSGDKEPPAINRISGGAPDAAAEISELEEKLQRLLDARSEHFQTISEWAEENAVTLDPIAAMVELERLRLAERGATGDPEEYALRLLLQRIGRLANRVSPVSAGSIRELLKPVFMEEREFNLFFHNRLGSLYRSPYSTSRHQPFSIDVGKAKAIDWIAGLDQISSDIEKALSGAGEALGDQLRDWINLAGFAISQRLRGLPDTVPNALAQVRCPDDVRIPPLLAMLLEEDDIARDVCLKAFNLYVSAINGCLFGALREGFIVRTRFQRIGTDQIHYVPKDKAWEYPDRLNTAKGPINAAVSSDWIEKDGAVIKPVETVRNLSSTGFAGAGVSEYLVQAPHDWYTPLDLRDVAHLVTGLPVEKNITKLKRLTNRTAFRMVGASSFKTHLDSVLLSDKIKLGDFTIIIDQHYRQSVTYGGKVKISYEPERLQVEAAVPVVDTRDRTVPEPDTLFDHIVAIDLGERSVGFAVFDIKSCLRTGEVKPIHDNNGNPVVGTVAVPSIRRLMKAVRSHRRRRQPNQKVNQTYSTALQNYRENVIGDVCNRIDTLMERYNAFPVLEFQIKNFQAGAKQLEIVYGSVLHRYTFSGVDAHKAKRREYWYNGELWEHPYLMAKKWNEETNSMSGAPKPVSLFPGVTVNAARTSQICHQCQRNPMSHLRGLTGTIEISSDGLLELDDGTIRLFETSDYDEDKFKQSRREKRRLDANVLLSGRHRAEYIYTVAKRNLRRPPKNVMTKDTTQSRYTCLYKNCSWTGHADENAAINIGRRYLAERIDMPASKTKAAV

SEQ ID NO: 1122 - protein, 1266 aa, unidentified
  REGION 1..1266: note = synthetic sequence
MRPRFHGGMNARDWRKHVGVLAQQHKETTRTYTFPLDTTGSAIDFDAALQAYNAVEGVGYGSLLGLACAVHLSGFRLFSTGKEAATFRNRARYPNAAFQAALRKELGTTITTLTPETLDRLFSSRPKRRNGVPLPWNQDSIRDRLYTNWVKPRPGDTPDAVLFQIATGIAQEITEDVSSWTDLAKNSDRGLKAAHRYFARVGGFPAFDNLTPPATVQPTDTTIDYDPNAPFHLVSHADQTLIHQSISLCAHRIRQEDPALDPNKSGFIKQLQNNFLSQTFYGLSWLFGAGYVHFRECTANDLAIQYGIPNNCRDGIHQIKSFADAILPNTFFEKKHYRKDSRSVGKKAKSWISNYWQRLLQLQTWVDDHTWVTLPQELTEAQFKPLFRGLLVDAVELMAIAERLPQRLADCRDSLDCLMGKGPQAATKNDVEIVEKVREEIESFVGQIEQLGNQLRHQLENENNDQVHRDNLHQLKNRLPLDLRRPQALNKISGGVPDVAKSIRGLETQLDQVLKERRSHFGRLTKWAKECGITLDPLQPLIESEKQRVAERGSAHDAKELAIRLLLQRIGRLGHRLSPTNATAIQELLRPVFAVKREFNLFFHNHMGALYRSPYSTSRHQPFQINVDVAHGTDWIGTIETLIQNLFTQIQDDALLRDLVQLEGFVFSHKLRALPGVIPSELARPNNLQQMGLPALLLVLLQADQVHRETVLRVFNLYGSAINGYLFQALRPGFIVRAGFQRLETKKLRYVPKAQSWQYPDRLHHAKSAIKNSLSAGWIKKNHQGAILPQKTLTALVKQKSLKDTGVPEYLVQAPHDWYVPIDLRGPAIPIEGLTVGTEGPELTQLGPMKDDCAFRAIGPSSFKSKIDAGLLPQDVKYGDMTLIFDQHYQQSISFANGTFSIQYQPTSLQVKAAIPVVDKRPRDTRNNSHLYDRIVAIDLGERKIGYAIFDLKQVLKSEQLEPMREDGKPLIGSISIRSIRGLMKAVQTHRNRRQPNYRIDQTYSKALMHYRESVIGDVCNAIDTLCARYGGFPVLESSVRNFEVGSAQLKTVYGSVSRRYTWSAVDAHKNQRQQYWLGGTKDKIPIWTHPYLMTREWDEKNSKWSNRSKPLKMHPGVEVHPAGTSQICHQCKRNPIGALWNVADTVVLDDQGQLDLDDGTIRLNSGYIDTTEIKRARRKKIRLPENKPLTGSHKTSHVRAVARRNLRQPPKSTRAKDTTQSRYTCLYVDCGHECHADENAAINIGRKYLQERIHIEASRQALSTR

SEQ ID NO: 1123 - protein, 1269 aa, unidentified
  REGION 1..1269: note = synthetic sequence
MVAGLKKIKRDGVTMKSNYHGGVKARAWRKRIGGLARRQKETVFTYKFPLETEEAGIDFDKAVQTYGIAEGISQGSLIGLVCAFHLSGFRLFSKADETKAFCNQGRYPNQAFAEKLRNELSVTLPKLSPQSLDVLFQSSPKSKNGVAPEWSKNAIRNRLYTNWTGKGAGTNPDEHLLEIAEDIAAEIDSDLDGWKDLEEHPEKGLSAADRYFQAQGDFPSLTGLPPSVPLTPQNSTVAFEGDPVCLNPSDNTLLHQAVARCAGRILQEQPNLSPDKNRFINQLQDELVSSQNNGLSWLFGVGFKYWKEMSVDQLADDYKVKSTDLDALKQVKSFIDAIPLNPLFDTPHYGEFRASVAGKMRSWVKNYWKRLLDLKSQLGTANINLPEGLDEQRAENLFSGLLIDSKGLRQVTDKLPSRLKKAEDTIDRLMGDGNPTSDDIEQVETVAAEISAFIGQVEQFNNQLEQRLENPLEGDDETFLKQLKIDLPAEFKKPPAINRISGGSPDPTAEIAELEEKLDRLMSARKEHYETIAEWASANKVTLDPMEAMTTLEAQRLTERGAEGDQEEFALRLLLQRIGRLANRLSPQGATAIRDLLRPVFTEKREFNLFFHNRMGSLYRSPYSTSRHQPFTIDVAVAKNTDWMDALDGIAETIMKGLSQAGDELSLRLRDWINISGFSLSQRLRGLPDTVPGELALVRSADDVRIPPMLALQLEEDEVSREVCLKAFNLYVSAINGCLFRALREGFIVRTKFQRLERDVLSYVPKTKLWNYPQRLDTARGPIHSALAAAWINKEGSVIDPVETVTALSDTGFSDDGIPEYLVQAPHDWYTPIDLRDISKPVSGLPVKKNITGLKRQKKQTAFRMVGPSSFKSHLDSTLLSEEVKLGDFTLIFDQYYKQRVSYNGRVKITFEPDRLHVEAAVPVIDKRVRPSTEEDALFDHLLAIDLGEKRVGYAVYDIKACLRTGDIKPLEDGDGKPIVGSVAVPSIRRLMKAVRSHRQQRQPNQKVNQTYSTALMNYRENVIGDVCNRIDTLMEKYNAFPVLESSVMNFEAGSRQLEMVYGSVLHRYTYSKIDAHTAKRKEYWYTGEYWDHPYLMAHKWNERTRSYSGSLSALTLYPGVMVHPAGTSQRCHQCKRNPMVEIKQLTGQVEINADGSLELDDGTICLYEGYDYSPEEYKKAKREKRRLDPNVPLSGRHQAKHVSAVAKRNLRRPTVSMMSGDTTQARYVCLYTDCDFTGHADENAAINIGWKYLTERIALSESKDKAGV

SEQ ID NO: 1124 - protein, 1340 aa, unidentified
  REGION 1..1340: note = synthetic sequence
MQISKVNHKHVAVGQKDRERITGFIYNDPVGDEKSLEDVVAKRANDTKVLFNVFNTKDLYDSQESDKSEKDKEIISKGAKFVAKSFNSAITILKKQNKIYSTLTSQQVIKELKDKFGGARIYDDDIEEALTETLKKSFRKENVRNSIKVLIENAAGIRSSLSKDEEELIQEYFVKQLVEEYTKTKLQKNVVKSIKNQNMVIQPDSDSQVLSLSESRREKQSSAVSSDTLVNCKEKDVLKAFLTDYAVLDEDERNSLLWKLRNLVNLYFYGSESIRDYSYTKEKSVWKEHDEQKANKTLFIDEICHITKIGKNGKEQKVLDYEENRSRCRKQNINYYRSALNYAKNNTSGIFENEDSNHFWIHLIENEVERLYNGIENGEEFKFETGYISEKVWKAVINHLSIKYIALGKAVYNYAMKELSSPGDIEPGKIDDSYINGITSFDYEIIKAEESLQRDISMNVVFATNYLACATVDTDKDFLLFSKEDIRSCTKKDGNLCKNIMQFWGGYSTWKNFCEEYLKDDKDALELLYSLKSMLYSMRNSSFHFSTENVDNGSWDTELIGKLFEEDCNRAARIEKEKFYNNNLHMFYSSSLLEKVLERLYSSHHERASQVPSFNRVFVRKNFPSSLSEQRITPKFTDSKDEQIWQSAVYYLCKEIYYNDFLQSKEAYKLFREGVKNLDKNDINNQKAADSFKQAVVYYGKAIGNATLSQVCQAIMTEYNRQNNDGLKKKSAYAEKQNSNKYKHYPLFLKQVLQSAFWEYLDENKEIYGFISAQIHKSNVEIKAEDFIANYSSQQYKKLVDKVKKTPELQKWYTLGRLINPRQANQFLGSIRNYVQFVKDIQRRAKENGNPIRNYYEVLESDSIIKILEMCTKLNGTTSNDIHDYFRDEDEYAEYISQFVNFGDVHSGAALNAFCNSESEGKKNGIYYDGINPIVNRNWVLCKLYGSPDLISKIISRVNENMIHDFHKQEDLIREYQIKGICSNKKEQQDLRTFQVLKNRVELRDIVEYSEIINELYGQLIKWCYLRERDLMYFQLGFHYLCLNNASSKEADYIKINVDDRNISGAILYQIAAMYINGLPVYYKKDDMYVALKSGKKASDELNSNEQTSKKINYFLKYGNNILGDKKDQLYLAGLELFENVAEHENIIIFRNEIDHFHYFYDRDRSMLDLYSEVFDRFFTYDMKLRKNVVNMLYNILLDHNIVSSFVFETGEKKVGRGDSEVIKPSAKIRLRANNGVSSDVFTYKVGSKDELKIATLPAKNEEFLLNVARLIYYPDMEAVSENMVREGVVKVEKSNDKKGKISRGSNTRSSNQSKYNNKSKNRMNYSMGSIFEKMDLKFD

SEQ ID NO: 1125 - protein, 1437 aa, unidentified
  REGION 1..1437: note = synthetic sequence
MKISKVREENRGAKLTVNAKTAVVSENRSQEGILYNDPSRYGKSRKNDEDRDRYIESRLKSSGKLYRIFNEDKNKRETDELQWFLSEIVKKINRRNGLVLSDMLSVDDRAFEKAFEKYAELSYTNRRNKVSGSPAFETCGVDAATAERLKGIISETNFINRIKNNIDNKVSEDIIDRIIAKYLKKSLCRERVKRGLKKLLMNAFDLPYSDPDIDVQRDFIDYVLEDFYHVRAKSQVSRSIKNMNMPVQPEGDGKFAITVSKGGTESGNKRSAEKEAFKKFLSDYASLDERVRDDMLRRMRRLVVLYFYGSDDSKLSDVNEKFDVWEDHAARRVDNREFIKLPLENKLANGKTDKDAERIRKNTVKELYRNQNIGCYRQAVKAVEEDNNGRYFDDKMLNMFFIHRIEYGVEKIYANLKQVTEFKARTGYLSEKIWKDLINYISIKYIAMGKAVYNYAMDELNASDKKEIELGKISEEYLSGISSFDYELIKAEEMLQRETAVYVAFAARHLSSQTVELDSENSDFLLLKPKGTMDKNDKNKLASNNILNFLKDKETLRDTILQYFGGHSLWTDFPFDKYLAGGKDDVDFLTDLKDVIYSMRNDSFHYATENHNNGKWNKELISAMFEHETERMTVVMKDKFYSNNLPMFYKNDDLKKLLIDLYKDNVERASQVPSFNKVFVRKNFPALVRDKDNLGIELDLKADADKGENELKFYNALYYMFKEIYYNAFLNDKNVRERFITKATKVADNYDRNKERNLKDRIKSAGSDEKKKLREQLQNYIAENDFGQRIKNIVQVNPDYTLAQICQLIMTEYNQQNNGCMQKKSAARKDINKDSYQHYKMLLLVNLRKAFLEFIKENYAFVLKPYKHDLCDKADFVPDFAKYVKPYAGLISRVAGSSELQKWYIVSRFLSPAQANHMLGFLHSYKQYVWDIYRRASETGTEINHSIAEDKIAGVDITDVDAVIDLSVKLCGTISSEISDYFKDDEVYAEYISSYLDFEYDGGNYKDSLNRFCNSDAVNDQKVALYYDGEHPKLNRNIILSKLYGERRFLEKITDRVSRSDIVEYYKLKKETSQYQTKGIFDSEDEQKNIKKFQEMKNIVEFRDLMDYSEIADELQGQLINWIYLRERDLMNFQLGYHYACLNNDSNKQATYVTLDYQGKKNRKINGAILYQICAMYINGLPLYYVDKDSSEWTVSDGKESTGAKIGEFYRYAKSFENTSDCYASGLEIFENISEHDNITELRNYIEHFRYYSSFDRSFLGIYSEVFDRFFTYDLKYRKNVPTILYNILLQHFVNVRFEFVSGKKMIGIDKKDRKIAKEKECARITIREKNGVYSEQFTYKLKNGTVYVDARDKRYLQSIIRLLFYPEKVNMDEMIEVKEKKKPSDNNTGKGYSKRDRQQDRKEYDKYKEKKKKEGNFLSGMGGNINWDEINAQLKN

SEQ ID NO: 1126 - protein, 1385 aa, Clostridium aminophilum
MKFSKVDHTRSAVGIQKATDSVHGMLYTDPKKQEVNDLDKRFDQLNVKAKRLYNVFNQSKAEEDDDEKRFGKVVKKLNRELKDLLFHREVSRYNSIGNAKYNYYGIKSNPEEIVSNLGMVESLKGERDPQKVISKLLLYYLRKGLKPGTDGLRMILEASCGLRKLSGDEKELKVFLQTLDEDFEKKTFKKNLIRSIENQNMAVQPSNEGDPIIGITQGRFNSQKNEEKSAIERMMSMYADLNEDHREDVLRKLRRLNVLYFNVDTEKTEEPTLPGEVDTNPVFEVWHDHEKGKENDRQFATFAKILTEDRETRKKEKLAVKEALNDLKSAIRDHNIMAYRCSIKVTEQDKDGLFFEDQRINRFWIHHIESAVERILASINPEKLYKLRIGYLGEKVWKDLLNYLSIKYIAVGKAVFHFAMEDLGKTGQDIELGKLSNSVSGGLTSFDYEQIRADETLQRQLSVEVAFAANNLFRAVVGQTGKKIEQSKSEENEEDFLLWKAEKIAESIKKEGEGNTLKSILQFFGGASSWDLNHFCAAYGNESSALGYETKFADDLRKAIYSLRNETFHFTTLNKGSFDWNAKLIGDMFSHEAATGIAVERTRFYSNNLPMFYRESDLKRIMDHLYNTYHPRASQVPSFNSVFVRKNFRLFLSNTLNTNTSFDTEVYQKWESGVYYLFKEIYYNSFLPSGDAHHLFFEGLRRIRKEADNLPIVGKEAKKRNAVQDFGRRCDELKNLSLSAICQMIMTEYNEQNNGNRKVKSTREDKRKPDIFQHYKMLLLRTLQEAFAIYIRREEFKFIFDLPKTLYVMKPVEEFLPNWKSGMFDSLVERVKQSPDLQRWYVLCKFLNGRLLNQLSGVIRSYIQFAGDIQRRAKANHNRLYMDNTQRVEYYSNVLEVVDFCIKGTSRFSNVFSDYFRDEDAYADYLDNYLQFKDEKIAEVSSFAALKTFCNEEEVKAGIYMDGENPVMQRNIVMAKLFGPDEVLKNVVPKVTREEIEEYYQLEKQIAPYRQNGYCKSEEDQKKLLRFQRIKNRVEFQTITEFSEIINELLGQLISWSFLRERDLLYFQLGFHYLCLHNDTEKPAEYKEISREDGTVIRNAILHQVAAMYVGGLPVYTLADKKLAAFEKGEADCKLSISKDTAGAGKKIKDFFRYSKYVLIKDRMLTDQNQKYTIYLAGLELFENTDEHDNITDVRKYVDHFKYYATSDENAMSILDLYSEIHDRFFTYDMKYQKNVANMLENILLRHFVLIRPEFFTGSKKVGEGKKITCKARAQIEIAENGMRSEDFTYKLSDGKKNISTCMIAARDQKYLNTVARLLYYPHEAKKSIVDTREKKNNKKTNRGDGTFNKQKGTARKEKDNGPREFNDTGFSNTPFAGFDPFRNS

SEQ ID NO: 1127 - protein, 1334 aa, unidentified
  REGION 1..1334: note = synthetic sequence
MKISKVDHTRMAVAKGNQHRRDEISGILYKDPTKTGSIDFDERFKKLNCSAKILYHVFNGIAEGSNKYKNIVDKVNNNLDRVLFTGKSYDRKSIIDIDTVLRNVEKINAFDRISTEEREQIIDDLLEIQLRKGLRKGKAGLREVLLIGAGVIVRTDKKQEIADFLEILDEDFNKTNQAKNIKLSIENQGLVVSPVSRGEERIFDVSGAQKGKSSKKAQEKEALSAFLLDYADLDKNVRFEYLRKIRRLINLYFYVKNDDVMSLTEIPAEVNLEKDFDIWRDHEQRKEENGDFVGCPDILLADRDVKKSNSKQVKIAERQLRESIREKNIKRYRFSIKTIEKDDGTYFFANKQISVFWIHRIENAVERILGSINDKKLYRLRLGYLGEKVWKDILNFLSIKYIAVGKAVFNFAMDDLQEKDRDIEPGKISENAVNGLTSFDYEQIKADEMLQREVAVNVAFAANNLARVTVDIPQNGEKEDILLWNKSDIKKYKKNSKKGILKSILQFFGGASTWNMKMFEIAYHDQPGDYEENYLYDIIQIIYSLRNKSFHFKTYDHGDKNWNRELIGKMIEHDAERVISVEREKFHSNNLPMFYKDADLKKILDLLYSDYAGRASQVPAFNTVLVRKNFPEFLRKDMGYKVHFNNPEVENQWHSAVYYLYKEIYYNLFLRDKEVKNLFYTSLKNIRSEVSDKKQKLASDDFASRCEEIEDRSLPEICQIIMTEYNAQNFGNRKVKSQRVIEKNKDIFRHYKMLLIKTLAGAFSLYLKQERFAFIGKATPIPYETTDVKNFLPEWKSGMYASFVEEIKNNLDLQEWYIVGRFLNGRMLNQLAGSLRSYIQYAEDIERRAAENRNKLFSKPDEKIEACKKAVRVLDLCIKISTRISAEFTDYFDSEDDYADYLEKYLKYQDDAIKELSGSSYAALDHFCNKDDLKFDIYVNAGQKPILQRNIVMAKLFGPDNILSEVMEKVTESAIREYYDYLKKVSGYRVRGKCSTEKEQEDLLKFQRLKNAVEFRDVTEYAEVINELLGQLISWSYLRERDLLYFQLGFHYMCLKNKSFKPAEYVDIRRNNGTIIHNAILYQIVSMYINGLDFYSCDKEGKTLKPIETGKGVGSKIGQFIKYSQYLYNDPSYKLEIYNAGLEVFENIDEHDNITDLRKYVDHFKYYAYGNKMSLLDLYSEFFDRFFTYDMKYQKNVVNVLENILLRHFVIFYPKFGSGKKDVGIRDCKKERAQIEISEQSLTSEDFMFKLDDKAGEEAKKFPARDERYLQTIAKLLYYPNEIEDMNRFMKKGETINKKVQFNRKKKITRKQKNNSSNEVLSSTMGYLFKNIKL

SEQ ID NO: 1128 - protein, 1175 aa, Carnobacterium gallinarum
MRITKVKIKLDNKLYQVTMQKEEKYGTLKLNEESRKSTAEILRLKKASFNKSFHSKTINSQKENKNATIKKNGDYISQIFEKLVGVDTNKNIRKPKMSLTDLKDLPKKDLALFIKRKFKNDDIVEIKNLDLISLFYNALQKVPGEHFTDESWADFCQEMMPYREYKNKFIERKIILLANSIEQNKGFSINPETFSKRKRVLHQWAIEVQERGDFSILDEKLSKLAEIYNFKKMCKRVQDELNDLEKSMKKGKNPEKEKEAYKKQKNFKIKTIWKDYPYKTHIGLIEKIKENEELNQFNIEIGKYFEHYFPIKKERCTEDEPYYLNSETIATTVNYQLKNALISYLMQIGKYKQFGLENQVLDSKKLQEIGIYEGFQTKFMDACVFATSSLKNIIEPMRSGDILGKREFKEAIATSSFVNYHHFFPYFPFELKGMKDRESELIPFGEQTEAKQMQNIWALRGSVQQIRNEIFHSFDKNQKFNLPQLDKSNFEFDASENSTGKSQSYIETDYKFLFEAEKNQLEQFFIERIKSSGALEYYPLKSLEKLFAKKEMKFSLGSQVVAFAPSYKKLVKKGHSYQTATEGTANYLGLSYYNRYELKEESFQAQYYLLKLIYQYVFLPNFSQGNSPAFRETVKAILRINKDEARKKMKKNKKFLRKYAFEQVREMEFKETPDQYMSYLQSEMREEKVRKAEKNDKGFEKNITMNFEKLLMQIFVKGFDVFLTTFAGKELLLSSEEKVIKETEISLSKKINEREKTLKASIQVEHQLVATNSAISYWLFCKLLDSRHLNELRNEMIKFKQSRIKFNHTQHAELIQNLLPIVELTILSNDYDEKNDSQNVDVSAYFEDKSLYETAPYVQTDDRTRVSFRPILKLEKYHTKSLIEALLKDNPQFRVAATDIQEWMHKREEIGELVEKRKNLHTEWAEGQQTLGAEKREEYRDYCKKIDRFNWKANKVTLTYLSQLHYLITDLLGRMVGFSALFERDLVYFSRSFSELGGETYHISDYKNLSGVLRLNAEVKPIKIKNIKVIDNEENPYKGNEPEVKPFLDRLHAYLENVIGIKAVHGKIRNQTAHLSVLQLELSMIESMNNLRDLMAYDRKLKNAVTKSMIKILDKHGMILKLKIDENHKNFEIESLIPKEIIHLKDKAIKTNQVSEEYCQLVLALLTTNPGNQLN

SEQ ID NO: 1129 - protein, 1154 aa, Paludibacter propionicigenes
MRVSKVKVKDGGKDKMVLVHRKTTGAQLVYSGQPVSNETSNILPEKKRQSFDLSTLNKTIIKFDTAKKQKLNVDQYKIVEKIFKYPKQELPKQIKAEEILPFLNHKFQEPVKYWKNGKEESFNLTLLIVEAVQAQDKRKLQPYYDWKTWYIQTKSDLLKKSIENNRIDLTENLSKRKKALLAWETEFTASGSIDLTHYHKVYMTDVLCKMLQDVKPLTDDKGKINTNAYHRGLKKALQNHQPAIFGTREVPNEANRADNQLSIYHLEVVKYLEHYFPIKTSKRRNTADDIAHYLKAQTLKTTIEKQLVNAIRANIIQQGKTNHHELKADTTSNDLIRIKTNEAFVLNLTGTCAFAANNIRNMVDNEQTNDILGKGDFIKSLLKDNTNSQLYSFFFGEGLSTNKAEKETQLWGIRGAVQQIRNNVNHYKKDALKTVFNISNFENPTITDPKQQTNYADTIYKARFINELEKIPEAFAQQLKTGGAVSYYTIENLKSLLTTFQFSLCRSTIPFAPGFKKVFNGGINYQNAKQDESFYELMLEQYLRKENFAEESYNARYFMLKLIYNNLFLPGFTTDRKAFADSVGFVQMQNKKQAEKVNPRKKEAYAFEAVRPMTAADSIADYMAYVQSELMQEQNKKEEKVAEETRINFEKFVLQVFIKGFDSFLRAKEFDFVQMPQPQLTATASNQQKADKLNQLEASITADCKLTPQYAKADDATHIAFYVFCKLLDAAHLSNLRNELIKFRESVNEFKFHHLLEIIEICLLSADVVPTDYRDLYSSEADCLARLRPFIEQGADITNWSDLFVQSDKHSPVIHANIELSVKYGTTKLLEQIINKDTQFKTTEANFTAWNTAQKSIEQLIKQREDHHEQWVKAKNADDKEKQERKREKSNFAQKFIEKHGDDYLDICDYINTYNWLDNKMHFVHLNRLHGLTIELLGRMAGFVALFDRDFQFFDEQQIADEFKLHGFVNLHSIDKKLNEVPTKKIKEIYDIRNKIIQINGNKINESVRANLIQFISSKRNYYNNAFLHVSNDEIKEKQMYDIRNHIAHFNYLTKDAADFSLIDLINELRELLHYDRKLKNAVSKAFIDLFDKHGMILKLKLNADHKLKVESLEPKKIYHLGSSAKDKPEYQYCTNQVMMAYCNMCRSLLEMKK

SEQ ID NO: 1130 - protein, 1120 aa, Listeria seeligeri
MWISIKTLIHHLGVLFFCDYMYNRREKKIIEVKTMRITKVEVDRKKVLISRDKNGGKLVYENEMQDNTEQIMHHKKSSFYKSVVNKTICRPEQKQMKKLVHGLLQENSQEKIKVSDVTKLNISNFLNHRFKKSLYYFPENSPDKSEEYRIEINLSQLLEDSLKKQQGTFICWESFSKDMELYINWAENYISSKTKLIKKSIRNNRIQSTESRSGQLMDRYMKDILNKNKPFDIQSVSEKYQLEKLTSALKATFKEAKKNDKEINYKLKSTLQNHERQIIEELKENSELNQFNIEIRKHLETYFPIKKTNRKVGDIRNLEIGEIQKIVNHRLKNKIVQRILQEGKLASYEIESTVNSNSLQKIKIEEAFALKFINACLFASNNLRNMVYPVCKKDILMIGEFKNSFKEIKHKKFIRQWSQFFSQEITVDDIELASWGLRGAIAPIRNEIIHLKKHSWKKFFNNPTFKVKKSKIINGKTKDVTSEFLYKETLFKDYFYSELDSVPELIINKMESSKILDYYSSDQLNQVFTIPNFELSLLTSAVPFAPSFKRVYLKGFDYQNQDEAQPDYNLKLNIYNEKAFNSEAFQAQYSLFKMVYYQVFLPQFTTNNDLFKSSVDFILTLNKERKGYAKAFQDIRKMNKDEKPSEYMSYIQSQLMLYQKKQEEKEKINHFEKFINQVFIKGFNSFIEKNRLTYICHPTKNTVPENDNIEIPFHTDMDDSNIAFWLMCKLLDAKQLSELRNEMIKFSCSLQSTEEISTFTKAREVIGLALLNGEKGCNDWKELFDDKEAWKKNMSLYVSEELLQSLPYTQEDGQTPVINRSIDLVKKYGTETILEKLFSSSDDYKVSAKDIAKLHEYDVTEKIAQQESLHKQWIEKPGLARDSAWTKKYQNVINDISNYQWAKTKVELTQVRHLHQLTIDLLSRLAGYMSIADRDFQFSSNYILERENSEYRVTSWILLSENKNKNKYNDYELYNLKNASIKVSSKNDPQLKVDLKQLRLTLEYLELFDNRLKEKRNNISHFNYLNGQLGNSILELFDDARDVLSYDRKLKNAVSKSLKEILSSHGMEVTFKPLYQTNHHLKIDKLQPKKIHHLGEKSTVSSNQVSNEYCQLVRTLLTMK

SEQ ID NO: 1131 - protein, 1051 aa, Listeria newyorkensis
MKITKMRVDGRTIVMERTSKEGQLGYEGIDGNKTTEIIFDKKKESFYKSILNKTVRKPDEKEKNRRKQAINKAINKEITELMLAVLHQEVPSQKLHNLKSLNTESLTKLFKPKFQNMISYPPSKGAEHVQFCLTDIAVPAIRDLDEIKPDWGIFFEKLKPYTDWAESYIHYKQTTIQKSIEQNKIQSPDSPRKLVLQKYVTAFLNGEPLGLDLVAKKYKLADLAESFKLVDLNEDKSANYKIKACLQQHQRNILDELKEDPELNQYGIEVKKYIQRYFPIKRAPNRSKHARADFLKKELIESTVEQQFKNAVYHYVLEQGKMEAYELTDPKTKDLQDIRSGEAFSFKFINACAFASNNLKMILNPECEKDILGKGNFKKNLPNSTTRSDVVKKMIPFFSDELQNVNFDEAIWAIRGSIQQIRNEVYHCKKHSWKSILKIKGFEFEPNNMKYADSDMQKLMDKDIAKIPEFIEEKLKSSGVVRFYRHDELQSIWEMKQGFSLLTTNAPFVPSFKRVYAKGHDYQTSKNRYYNLDLTTFDILEYGEEDFRARYFLTKLVYYQQFMPWFTADNNAFRDAANFVLRLNKNRQQDAKAFINIREVEEGEMPRDYMGYVQGQIAIHEDSIEDTPNHFEKFISQVFIKGFDRHMRSANLKFIKNPRNQGLEQSEIEEMSFDIKVEPSFLKNKDDYIAFWIFCKMLDARHLSELRNEMIKYDGHLTGEQEIIGLALLGVDSRENDWKQFFSSEREYEKIMKGYVVEELYQREPYRQSDGKTPILFRGVEQARKYGTETVIQRLFDANPEFKVSKCNLAEWERQKETIEETIKRRKELHNEWAKNPKKPQNNAFFKEYKECCDAIDAYNWHKNKTTLAYVNELHHLLIEILGRYVGYVAIADRDFQCMANQYFKHSGITERVEYWGDNRLKSIKKLDTFLKKEGLFVSEKNARNHIAHLNYLSLKSECTLLYLSERLREIFKYDRKLKNAVSKSLIDILDRHGMSVVFANLKENKHRLVIKSLEPKKLRHLGGKKIDGGYIETNQVSEEYCGIVKRLLEM

SEQ ID NO: 1132 - protein, 1182 aa, Leptotrichia wadei
MYMKITKIDGVSHYKKQDKGILKKKWKDLDERKQREKIEARYNKQIESKIYKEFFRLKNKKRIEKEEDQNIKSLYFFIKELYLNEKNEEWELKNINLEILDDKERVIKGYKFKEDVYFFKEGYKEYYLRILFNNLIEKVQNENREKVRKNKEFLDLKEIFKKYKNRKIDLLLKSINNNKINLEYKKENVNEEIYGINPTNDREMTFYELLKEIIEKKDEQKSILEEKLDNFDITNFLENIEKIFNEETEINIIKGKVLNELREYIKEKEENNSDNKLKQIYNLELKKYIENNFSYKKQKSKSKNGKNDYLYLNFLKKIMFIEEVDEKKEINKEKFKNKINSNFKNLFVQHILDYGKLLYYKENDEYIKNTGQLETKDLEYIKTKETLIRKMAVLVSFAANSYYNLFGRVSGDILGTEVVKSSKTNVIKVGSHIFKEKMLNYFFDFEIFDANKIVEILESISYSIYNVRNGVGHFNKLILGKYKKKDINTNKRIEEDLNNNEEIKGYFIKKRGEIERKVKEKFLSNNLQYYYSKEKIENYFEVYEFEILKRKIPFAPNFKRIIKKGEDLFNNKNNKKYEYFKNFDKNSAEEKKEFLKTRNFLLKELYYNNFYKEFLSKKEEFEKIVLEVKEEKKSRGNINNKKSGVSFQSIDDYDTKINISDYIASIHKKEMERVEKYNEEKQKDTAKYIRDFVEEIFLTGFINYLEKDKRLHFLKEEFSILCNNNNNVVDFNININEEKIKEFLKENDSKTLNLYLFFNMIDSKRISEFRNELVKYKQFTKKRLDEEKEFLGIKIELYETLIEFVILTREKLDTKKSEEIDAWLVDKLYVKDSNEYKEYEEILKLFVDEKILSSKEAPYYATDNKTPILLSNFEKTRKYGTQSFLSEIQSNYKYSKVEKENIEDYNKKEEIEQKKKSNIEKLQDLKVELHKKWEQNKITEKEIEKYNNTTRKINEYNYLKNKEELQNVYLLHEMLSDLLARNVAFFNKWERDFKFIVIAIKQFLRENDKEKVNEFLNPPDNSKGKKVYFSVSKYKNTVENIDGIHKNFMNLIFLNNKFMNRKIDKMNCAIWVYFRNYIAHFLHLHTKNEKISLISQMNLLIKLFSYDKKVQNHILKSTKTLLEKYNIQINFEISNDKNEVFKYKIKNRLYSKKGKMLGKNNKFEILENEFLENVKAMLEYSE

SEQ ID NO: 1133 - protein, 1285 aa, Rhodobacter capsulatus
MQIGKVQGRTISEFGDPAGGLKRKISTDGKNRKELPAHLSSDPKALIGQWISGIDKIYRKPDSRKSDGKAIHSPTPSKMQFDARDDLGEAFWKLVSEAGLAQDSDYDQFKRRLHPYGDKFQPADSGAKLKFEADPPEPQAFHGRWYGAMSKRGNDAKELAAALYEHLHVDEKRIDGQPKRNPKTDKFAPGLVVARALGIESSVLPRGMARLARNWGEEEIQTYFVVDVAASVKEVAKAAVSAAQAFDPPRQVSGRSLSPKVGFALAEHLERVTGSKRCSFDPAAGPSVLALHDEVKKTYKRLCARGKNAARAFPADKTELLALMRHTHENRVRNQMVRMGRVSEYRGQQAGDLAQSHYWTSAGQTEIKESEIFVRLWVGAFALAGRSMKAWIDPMGKIVNTEKNDRDLTAAVNIRQVISNKEMVAEAMARRGIYFGETPELDRLGAEGNEGFVFALLRYLRGCRNQTFHLGARAGFLKEIRKELEKTRWGKAKEAEHVVLTDKTVAAIRAIIDNDAKALGARLLADLSGAFVAHYASKEHFSTLYSEIVKAVKDAPEVSSGLPRLKLLLKRADGVRGYVHGLRDTRKHAFATKLPPPPAPRELDDPATKARYIALLRLYDGPFRAYASGITGTALAGPAARAKEAATALAQSVNVTKAYSDVMEGRSSRLRPPNDGETLREYLSALTGETATEFRVQIGYESDSENARKQAEFIENYRRDMLAFMFEDYIRAKGFDWILKIEPGATAMTRAPVLPEPIDTRGQYEHWQAALYLVMHFVPASDVSNLLHQLRKWEALQGKYELVQDGDATDQADARREALDLVKRFRDVLVLFLKTGEARFEGRAAPFDLKPFRALFANPATFDRLFMATPTTARPAEDDPEGDGASEPELRVARTLRGLRQIARYNHMAVLSDLFAKHKVRDEEVARLAEIEDETQEKSQIVAAQELRTDLHDKVMKCHPKTISPEERQSYAAAIKTIEEHRFLVGRVYLGDHLRLHRLMMDVIGRLIDYAGAYERDTGTFLINASKQLGAGADWAVTIAGAANTDARTQTRKDLAHFNVLDRADGTPDLTALVNRAREMMAYDRKRKNAVPRSILDMLARLGLTLKWQMKDHLLQDATITQAAIKHLDKVRLTVGGPAAVTEARFSQDYLQMVAAVFNGSVQNPKPRRRDDGDAWHKPPKPATAQSQPDQKPPNKAPSAGSRLPPPQVGEVYEGVVVKVIDTGSLGFLAVEGVAGNIGLHISRLRRIREDAIIVGRRYRFRVEIYVPPKSNTSKLNAADLVRID

SEQ ID NO: 1134 - protein, 1159 aa, Leptotrichia buccalis
MKVTKVGGISHKKYTSEGRLVKSESEENRTDERLSALLNMRLDMYIKNPSSTETKENQKRIGKLKKFFSNKMVYLKDNTLSLKNGKKENIDREYSETDILESDVRDKKNFAVLKKIYLNENVNSEELEVFRNDIKKKLNKINSLKYSFEKNKANYQKINENNIEKVEGKSKRNIIYDYYRESAKRDAYVSNVKEAFDKLYKEEDIAKLVLEIENLTKLEKYKIREFYHEIIGRKNDKENFAKIIYEEIQNVNNMKELIEKVPDMSELKKSQVFYKYYLDKEELNDKNIKYAFCHFVEIEMSQLLKNYVYKRLSNISNDKIKRIFEYQNLKKLIENKLLNKLDTYVRNCGKYNYYLQDGEIATSDFIARNRQNEAFLRNIIGVSSVAYFSLRNILETENENDITGRMRGKTVKNNKGEEKYVSGEVDKIYNENKKNEVKENLKMFYSYDFNMDNKNEIEDFFANIDEAISSIRHGIVHFNLELEGKDIFAFKNIAPSEISKKMFQNEINEKKLKLKIFRQLNSANVFRYLEKYKILNYLKRTRFEFVNKNIPFVPSFTKLYSRIDDLKNSLGIYWKTPKTNDDNKTKEIIDAQIYLLKNIYYGEFLNYFMSNNGNFFEISKEIIELNKNDKRNLKTGFYKLQKFEDIQEKIPKEYLANIQSLYMINAGNQDEEEKDTYIDFIQKIFLKGFMTYLANNGRLSLIYIGSDEETNTSLAEKKQEFDKFLKKYEQNNNIKIPYEINEFLREIKLGNILKYTERLNMFYLILKLLNHKELTNLKGSLEKYQSANKEEAFSDQLELINLLNLDNNRVTEDFELEADEIGKFLDFNGNKVKDNKELKKFDTNKIYFDGENIIKHRAFYNIKKYGMLNLLEKIADKAGYKISIEELKKYSNKKNEIEKNHKMQENLHRKYARPRKDEKFTDEDYESYKQAIENIEEYTHLKNKVEFNELNLLQGLLLRILHRLVGYTSIWERDLRFRLKGEFPENQYIEEIFNFENKKNVKYKGGQIVEKYIKFYKELHQNDEVKINKYSSANIKVLKQEKKDLYIRNYIAHFNYIPHAEISLLEVLENLRKLLSYDRKLKNAVMKSVVDILKEYGFVATFKIGADKKIGIQTLESEKIVHLKNLKKKKLMTDRNSEELCKLVKIMFEYKMEEKKSEN

SEQ ID NO: 1135 - protein, 1389 aa, Leptotrichia shahii
MGNLFGHKRWYEVRDKKDFKIKRKVKVKRNYDGNKYILNINENNNKEKIDNNKFIRKYINYKKNDNILKEFTRKFHAGNILFKLKGKEGIIRIENNDDFLETEEVVLYIEAYGKSEKLKALGITKKKIIDEAIRQGITKDDKKIEIKRQENEEEIEIDIRDEYTNKTLNDCSIILRIIENDELETKKSIYEIFKNINMSLYKIIEKIIENETEKVFENRYYEEHLREKLLKDDKIDVILTNFMEIREKIKSNLEILGFVKFYLNVGGDKKKSKNKKMLVEKILNINVDLTVEDIADFVIKELEFWNITKRIEKVKKVNNEFLEKRRNRTYIKSYVLLDKHEKFKIERENKKDKIVKFFVENIKNNSIKEKIEKILAEFKIDELIKKLEKELKKGNCDTEIFGIFKKHYKVNFDSKKFSKKSDEEKELYKIIYRYLKGRIEKILVNEQKVRLKKMEKIEIEKILNESILSEKILKRVKQYTLEHIMYLGKLRHNDIDMTTVNTDDFSRLHAKEELDLELITFFASTNMELNKIFSRENINNDENIDFFGGDREKNYVLDKKILNSKIKIIRDLDFIDNKNNITNNFIRKFTKIGTNERNRILHAISKERDLQGTQDDYNKVINIIQNLKISDEEVSKALNLDVVFKDKKNIITKINDIKISEENNNDIKYLPSFSKVLPEILNLYRNNPKNEPFDTIETEKIVLNALIYVNKELYKKLILEDDLEENESKNIFLQELKKTLGNIDEIDENIIENYYKNAQISASKGNNKAIKKYQKKVIECYIGYLRKNYEELFDFSDFKMNIQEIKKQIKDINDNKTYERITVKTSDKTIVINDDFEYIISIFALLNSNAVINKIRNRFFATSVWLNTSEYQNIIDILDEIMQLNTLRNECITENWNLNLEEFIQKMKEIEKDFDDFKIQTKKEIFNNYYEDIKNNILTEFKDDINGCDVLEKKLEKIVIFDDETKFEIDKKSNILQDEQRKLSNINKKDLKKKVDQYIKDKDQEIKSKILCRIIFNSDFLKKYKKEIDNLIEDMESENENKFQEIYYPKERKNELYIYKKNLFLNIGNPNFDKIYGLISNDIKMADAKFLFNIDGKNIRKNKISEIDAILKNLNDKLNGYSKEYKEKYIKKLKENDDFFAKNIQNKNYKSFEKDYNRVSEYKKIRDLVEFNYLNKIESYLIDINWKLAIQMARFERDMHYIVNGLRELGIIKLSGYNTGISRAYPKRNGSDGFYTTTAYYKFFDEESYKKFEKICYGFGIDLSENSEINKPENESIRNYISHFYIVRNPFADYSIAEQIDRVSNLLSYSTRYNNSTYASVFEVFKKDVNLDYDELKKKFKLIGNNDILERLMKPKKVSVLELESYNSDYIKNLIIELLTKIENTNDTL

SEQ ID NO: 1136 - DNA, 20 bp, synthetic construct
  misc_feature 1..20: note = synthetic sequence
  source 1..20: mol_type = other DNA
ctctgcattgttttggcctc

SEQ ID NO: 1137 - DNA, 20 bp, synthetic construct
  misc_feature 1..20: note = synthetic sequence
  source 1..20: mol_type = other DNA
tcctccaaagagtagaatgg

SEQ ID NO: 1138 - DNA, 20 bp, synthetic construct
  misc_feature 1..20: note = synthetic sequence
  source 1..20: mol_type = other DNA
gccctaaacttacactgttc

SEQ ID NO: 1139 - DNA, 20 bp, synthetic construct
  misc_feature 1..20: note = synthetic sequence
  source 1..20: mol_type = other DNA
aaagatagattagattgtcc

SEQ ID NO: 1140 - DNA, 20 bp, synthetic construct
  misc_feature 1..20: note = synthetic sequence
  source 1..20: mol_type = other DNA
gtggtgtcctttgaatatgc

SEQ ID NO: 1141 - DNA, 20 bp, synthetic construct
  misc_feature 1..20: note = synthetic sequence
  source 1..20: mol_type = other DNA
agattgtccaggatataatt

SEQ ID NO: 1142 - DNA, 20 bp, synthetic construct
  misc_feature 1..20: note = synthetic sequence
  source 1..20: mol_type = other DNA
ttagcaaccaaattatatcc

SEQ ID NO: 1143 - DNA, 20 bp, synthetic construct
  misc_feature 1..20: note = synthetic sequence
  source 1..20: mol_type = other DNA
gttgaaattaaactacacac

SEQ ID NO: 1144 - DNA, 20 bp, synthetic construct
  misc_feature 1..20: note = synthetic sequence
  source 1..20: mol_type = other DNA
atctttacctgcatattcaa

SEQ ID NO: 1145 - DNA, 17 bp, synthetic construct
  misc_feature 1..17: note = synthetic sequence
  source 1..17: mol_type = other DNA
gtgtcctttgaatatgc

SEQ ID NO: 1146 - DNA, 17 bp, synthetic construct
  misc_feature 1..17: note = synthetic sequence
  source 1..17: mol_type = other DNA
ttgtccaggatataatt

SEQ ID NO: 1147 - DNA, 17 bp, synthetic construct
  misc_feature 1..17: note = synthetic sequence
  source 1..17: mol_type = other DNA
gcaaccaaattatatcc

SEQ ID NO: 1148 - DNA, 17 bp, synthetic construct
  misc_feature 1..17: note = synthetic sequence
  source 1..17: mol_type = other DNA
gaaattaaactacacac

SEQ ID NO: 1149 - DNA, 17 bp, synthetic construct
  misc_feature 1..17: note = synthetic sequence
  source 1..17: mol_type = other DNA
tttacctgcatattcaa

SEQ ID NO: 1150 - RNA, 20 nt, synthetic construct
  misc_feature 1..20: note = synthetic sequence
  source 1..20: mol_type = other RNA
gtggtgtcctttgaatatgc

SEQ ID NO: 1151 - RNA, 20 nt, synthetic construct
  misc_feature 1..20: note = synthetic sequence
  source 1..20: mol_type = other RNA
agattgtccaggatataatt

SEQ ID NO: 1152 - RNA, 20 nt, synthetic construct
  misc_feature 1..20: note = synthetic sequence
  source 1..20: mol_type = other RNA
ttagcaaccaaattatatcc

SEQ ID NO: 1153 - RNA, 20 nt, synthetic construct
  misc_feature 1..20: note = synthetic sequence
  source 1..20: mol_type = other RNA
gttgaaattaaactacacac

SEQ ID NO: 1154 - RNA, 20 nt, synthetic construct
  misc_feature 1..20: note = synthetic sequence
  source 1..20: mol_type = other RNA
atctttacctgcatattcaa

SEQ ID NO: 1155 - RNA, 17 nt, synthetic construct
  misc_feature 1..17: note = synthetic sequence
  source 1..17: mol_type = other RNA
gtgtcctttgaatatgc

SEQ ID NO: 1156 - RNA, 17 nt, synthetic construct
  misc_feature 1..17: note = synthetic sequence
  source 1..17: mol_type = other RNA
ttgtccaggatataatt

SEQ ID NO: 1157 - RNA, 17 nt, synthetic construct
  misc_feature 1..17: note = synthetic sequence
  source 1..17: mol_type = other RNA
gcaaccaaattatatcc

SEQ ID NO: 1158 - RNA, 17 nt, synthetic construct
  misc_feature 1..17: note = synthetic sequence
  source 1..17: mol_type = other RNA
gaaattaaactacacac

SEQ ID NO: 1159 - RNA, 17 nt, synthetic construct
  misc_feature 1..17: note = synthetic sequence
  source 1..17: mol_type = other RNA
tttacctgcatattcaa

SEQ ID NO: 1160 - DNA, 20 bp, synthetic construct
  misc_feature 1..20: note = synthetic sequence
  source 1..20: mol_type = other DNA
tacacatttttaggcttgac

SEQ ID NO: 1161 - DNA, 20 bp, synthetic construct
  misc_feature 1..20: note = synthetic sequence
  source 1..20: mol_type = other DNA
cattcctgggagtctgtcat

SEQ ID NO: 1162 - DNA, 20 bp, synthetic construct
  misc_feature 1..20: note = synthetic sequence
  source 1..20: mol_type = other DNA
tgtatgatgctataatacca

SEQ ID NO: 1163 - DNA, 20 bp, synthetic construct
  misc_feature 1..20: note = synthetic sequence
  source 1..20: mol_type = other DNA
gtggaaagtacataggacct

SEQ ID NO: 1164 - DNA, 20 bp, synthetic construct
  misc_feature 1..20: note = synthetic sequence
  source 1..20: mol_type = other DNA
tcttatcataactcttacca

SEQ ID NO: 1165 - DNA, 17 bp, synthetic construct
  misc_feature 1..17: note = synthetic sequence
  source 1..17: mol_type = other DNA
acatttttaggcttgac

SEQ ID NO: 1166 - DNA, 17 bp, synthetic construct
  misc_feature 1..17: note = synthetic sequence
  source 1..17: mol_type = other DNA
tcctgggagtctgtcat

SEQ ID NO: 1167 - DNA, 17 bp, synthetic construct
  misc_feature 1..17: note = synthetic sequence
  source 1..17: mol_type = other DNA
atgatgctataatacca

SEQ ID NO: 1168 - DNA, 17 bp, synthetic construct
  misc_feature 1..17: note = synthetic sequence
  source 1..17: mol_type = other DNA
gaaagtacataggacct

SEQ ID NO: 1169 - DNA, 17 bp, synthetic construct
  misc_feature 1..17: note = synthetic sequence
  source 1..17: mol_type = other DNA
tatcataactcttacca

SEQ ID NO: 1170 - RNA, 20 nt, synthetic construct
  misc_feature 1..20: note = synthetic sequence
  source 1..20: mol_type = other RNA
tacacatttttaggcttgac

SEQ ID NO: 1171 - RNA, 20 nt, synthetic construct
  misc_feature 1..20: note = synthetic sequence
  source 1..20: mol_type = other RNA
cattcctgggagtctgtcat

SEQ ID NO: 1172 - RNA, 20 nt, synthetic construct
  misc_feature 1..20: note = synthetic sequence
  source 1..20: mol_type = other RNA
tgtatgatgctataatacca

SEQ ID NO: 1173 - RNA, 20 nt, synthetic construct
  misc_feature 1..20: note = synthetic sequence
  source 1..20: mol_type = other RNA
gtggaaagtacataggacct

SEQ ID NO: 1174 - RNA, 20 nt, synthetic construct
  misc_feature 1..20: note = synthetic sequence
  source 1..20: mol_type = other RNA
tcttatcataactcttacca

SEQ ID NO: 1175 - RNA, 17 nt, synthetic construct
  misc_feature 1..17: note = synthetic sequence
  source 1..17: mol_type = other RNA
acatttttaggcttgac

SEQ ID NO: 1176 - RNA, 17 nt, synthetic construct
  misc_feature 1..17: note = synthetic sequence
  source 1..17: mol_type = other RNA
tcctgggagtctgtcat

SEQ ID NO: 1177 - RNA, 17 nt, synthetic construct
  misc_feature 1..17: note = synthetic sequence
  source 1..17: mol_type = other RNA
atgatgctataatacca

SEQ ID NO: 1178 - RNA, 17 nt, synthetic construct
  misc_feature 1..17: note = synthetic sequence
  source 1..17: mol_type = other RNA
gaaagtacataggacct

SEQ ID NO: 1179 - RNA, 17 nt, synthetic construct
  misc_feature 1..17: note = synthetic sequence
  source 1..17: mol_type = other RNA
tatcataactcttacca

SEQ ID NO: 1180 - DNA, 20 bp, synthetic construct
  misc_feature 1..20: note = synthetic sequence
  source 1..20: mol_type = other DNA
gttgctaaattacatagttt

SEQ ID NO: 1181 - DNA, 20 bp, synthetic construct
  misc_feature 1..20: note = synthetic sequence
  source 1..20: mol_type = other DNA
tgttgcaatagtcaatcaag

SEQ ID NO: 1182 - DNA, 20 bp, synthetic construct
  misc_feature 1..20: note = synthetic sequence
  source 1..20: mol_type = other DNA
atactgattaagacagatga

SEQ ID NO: 1183 - DNA, 20 bp, synthetic construct
  misc_feature 1..20: note = synthetic sequence
  source 1..20: mol_type = other DNA
aatactgattaagacagatg

SEQ ID NO: 1184 - DNA, 20 bp, synthetic construct
  misc_feature 1..20: note = synthetic sequence
  source 1..20: mol_type = other DNA
ctctatacaaatgccaacgc

SEQ ID NO: 1185 - DNA, 20 bp, synthetic construct
  misc_feature 1..20: note = synthetic sequence
  source 1..20: mol_type = other DNA
acttgcatgcacaccagcgt

SEQ ID NO: 1186 - DNA, 20 bp, synthetic construct
  misc_feature 1..20: note = synthetic sequence
  source 1..20: mol_type = other DNA
ttgggctaatgtagcataat

SEQ ID NO: 1187 - DNA, 20 bp, synthetic construct
  misc_feature 1..20: note = synthetic sequence
  source 1..20: mol_type = other DNA
gcgttggcatttgtatagag

SEQ ID NO: 1188 - DNA, 20 bp, synthetic construct
  misc_feature 1..20: note = synthetic sequence
  source 1..20: mol_type = other DNA
tgggctaatgtagcataatg

SEQ ID NO: 1189 - DNA, 20 bp, synthetic construct
  misc_feature 1..20: note = synthetic sequence
  source 1..20: mol_type = other DNA
tttgggctaatgtagcataa

SEQ ID NO: 1190 - DNA, 20 bp, synthetic construct
  misc_feature 1..20: note = synthetic sequence
  source 1..20: mol_type = other DNA
gcttaactccttaatattaa

SEQ ID NO: 1191 - DNA, 20 bp, synthetic construct
  misc_feature 1..20: note = synthetic sequence
  source 1..20: mol_type = other DNA
tcttctatattaaagcagat

SEQ ID NO: 1192 - DNA, 20 bp, synthetic construct
  misc_feature 1..20: note = synthetic sequence
  source 1..20: mol_type = other DNA
cttctatattaaagcagatt

SEQ ID NO: 1193 - DNA, 20 bp, synthetic construct
  misc_feature 1..20: note = synthetic sequence
  source 1..20: mol_type = other DNA
aatatataactaccttgggt

SEQ ID NO: 1194 - DNA, 20 bp, synthetic construct
  misc_feature 1..20: note = synthetic sequence
  source 1..20: mol_type = other DNA
acctccattctactctttgg

SEQ ID NO: 1195 - DNA, 20 bp, synthetic construct
  misc_feature 1..20: note = synthetic sequence
  source 1..20: mol_type = other DNA
tttcaatgatatccaaccca

SEQ ID NO: 1196 - DNA, 20 bp, synthetic construct
  misc_feature 1..20: note = synthetic sequence
  source 1..20: mol_type = other DNA
agtacctccattctactctt

SEQ ID NO: 1197 - DNA, 20 bp, synthetic construct
  misc_feature 1..20: note = synthetic sequence
  source 1..20: mol_type = other DNA
ctatcctccaaagagtagaa

SEQ ID NO: 1198 - DNA, 20 bp, synthetic construct
  misc_feature 1..20: note = synthetic sequence
  source 1..20: mol_type = other DNA
ttttgctacatatttcaggc

SEQ ID NO: 1199 - DNA, 20 bp, synthetic construct
  misc_feature 1..20: note = synthetic sequence
  source 1..20: mol_type = other DNA
tttgctacatatttcaggct

SEQ ID NO: 1200 - DNA, 20 bp, synthetic construct
  misc_feature 1..20: note = synthetic sequence
  source 1..20: mol_type = other DNA
gggttggatatcattgaaaa

SEQ ID NO: 1201 - DNA, 20 bp, synthetic construct
  misc_feature 1..20: note = synthetic sequence
  source 1..20: mol_type = other DNA
atatttcaggctgggtttct

SEQ ID NO: 1202 - DNA, 20 bp, synthetic construct
  misc_feature 1..20: note = synthetic sequence
  source 1..20: mol_type = other DNA
ttgaaatatataactacctt

SEQ ID NO: 1203 - DNA, 20 bp, synthetic construct
  misc_feature 1..20: note = synthetic sequence
  source 1..20: mol_type = other DNA
attgaaatatataactacct

SEQ ID NO: 1204 - DNA, 20 bp, synthetic construct
  misc_feature 1..20: note = synthetic sequence
  source 1..20: mol_type = other DNA
gtgagtagtggggcacttta

SEQ ID NO: 1205 - DNA, 20 bp, synthetic construct
  misc_feature 1..20: note = synthetic sequence
  source 1..20: mol_type = other DNA
tgtatgtagaaggttaacta

SEQ ID NO: 1206 - DNA, 20 bp, synthetic construct
  misc_feature 1..20: note = synthetic sequence
  source 1..20: mol_type = other DNA
gagcctaataaatgtacaat

SEQ ID NO: 1207 - DNA, 20 bp, synthetic construct
  misc_feature 1..20: note = synthetic sequence
  source 1..20: mol_type = other DNA
ttgtatgtagaaggttaact

SEQ ID NO: 1208 - DNA, 20 bp, synthetic construct
  misc_feature 1..20: note = synthetic sequence
  source 1..20: mol_type = other DNA
caatttgttttgatgtaact

SEQ ID NO: 1209 - DNA, 20 bp, synthetic construct
  misc_feature 1..20: note = synthetic sequence
  source 1..20: mol_type = other DNA
tgccttctgaaatagtccag

SEQ ID NO: 1210 - DNA, 20 bp, synthetic construct
  misc_feature 1..20: note = synthetic sequence
  source 1..20: mol_type = other DNA
gttaatagggaaacagcata

SEQ ID NO: 1211 - DNA, 20 bp, synthetic construct
  misc_feature 1..20: note = synthetic sequence
  source 1..20: mol_type = other DNA
aacaatgcagagttaattgt

SEQ ID NO: 1212 - DNA, 20 bp, synthetic construct
  misc_feature 1..20: note = synthetic sequence
  source 1..20: mol_type = other DNA
gaacatgttgagtagacaca

SEQ ID NO: 1213 - DNA, 20 bp, synthetic construct
  misc_feature 1..20: note = synthetic sequence
  source 1..20: mol_type = other DNA
tttatcatctgtgtctattc

SEQ ID NO: 1214 - DNA, 20 bp, synthetic construct
  misc_feature 1..20: note = synthetic sequence
  source 1..20: mol_type = other DNA
tctttactttcttgactata

SEQ ID NO: 1215 - DNA, 20 bp, synthetic construct
  misc_feature 1..20: note = synthetic sequence
  source 1..20: mol_type = other DNA
aatattctcaaacctcgttc

SEQ ID NO: 1216 - DNA, 20 bp, synthetic construct
  misc_feature 1..20: note = synthetic sequence
  source 1..20: mol_type = other DNA
attaactgtgttccagaacg

SEQ ID NO: 1217 - DNA, 20 bp, synthetic construct
  misc_feature 1..20: note = synthetic sequence
  source 1..20: mol_type = other DNA
taactgcttctttggatgac

SEQ ID NO: 1218 - DNA, 20 bp, synthetic construct
  misc_feature 1..20: note = synthetic sequence
  source 1..20: mol_type = other DNA
gaccagaacagtgtaagttt

SEQ ID NO: 1219 - DNA, 20 bp, synthetic construct
  misc_feature 1..20: note = synthetic sequence
  source 1..20: mol_type = other DNA
accagaacagtgtaagttta

SEQ ID NO: 1220 - DNA, 20 bp, synthetic construct
  misc_feature 1..20: note = synthetic sequence
  source 1..20: mol_type = other DNA
ctactttttccccactactg

SEQ ID NO: 1221 - DNA, 20 bp, synthetic construct
  misc_feature 1..20: note = synthetic sequence
  source 1..20: mol_type = other DNA
tggaacacagttaattcact

SEQ ID NO: 1222 - DNA, 20 bp, synthetic construct
  misc_feature 1..20: note = synthetic sequence
  source 1..20: mol_type = other DNA
gtgttgtttaactgcttctt

SEQ ID NO: 1223 - RNA, 20 nt, synthetic construct
  misc_feature 1..20: note = synthetic sequence
  source 1..20: mol_type = other RNA
ctctgcattgttttggcctc

SEQ ID NO: 1224 - RNA, 20 nt, synthetic construct
  misc_feature 1..20: note = synthetic sequence
  source 1..20: mol_type = other RNA
tcctccaaagagtagaatgg

SEQ ID NO: 1225 - RNA, 20 nt, synthetic construct
  misc_feature 1..20: note = synthetic sequence
  source 1..20: mol_type = other RNA
gccctaaacttacactgttc

SEQ ID NO: 1226 - RNA, 20 nt, synthetic construct
  misc_feature 1..20: note = synthetic sequence
  source 1..20: mol_type = other RNA
aaagatagattagattgtcc

SEQ ID NO: 1227 - RNA, 20 nt, synthetic construct
  misc_feature 1..20: note = synthetic sequence
  source 1..20: mol_type = other RNA
gttgctaaattacatagttt

SEQ ID NO: 1228 - RNA, 20 nt, synthetic construct
  misc_feature 1..20: note = synthetic sequence
  source 1..20: mol_type = other RNA
tgttgcaatagtcaatcaag

SEQ ID NO: 1229 - RNA, 20 nt, synthetic construct
  misc_feature 1..20: note = synthetic sequence
  source 1..20: mol_type = other RNA
atactgattaagacagatga

SEQ ID NO: 1230 - RNA, 20 nt, synthetic construct
  misc_feature 1..20: note = synthetic sequence
  source 1..20: mol_type = other RNA
aatactgattaagacagatg

SEQ ID NO: 1231 - RNA, 20 nt, synthetic construct
  misc_feature 1..20: note = synthetic sequence
  source 1..20: mol_type = other RNA
ctctatacaaatgccaacgc

SEQ ID NO: 1232 - RNA, 20 nt, synthetic construct
  misc_feature 1..20: note = synthetic sequence
  source 1..20: mol_type = other RNA
acttgcatgcacaccagcgt

SEQ ID NO: 1233 - RNA, 20 nt, synthetic construct
  misc_feature 1..20: note = synthetic sequence
  source 1..20: mol_type = other RNA
ttgggctaatgtagcataat

SEQ ID NO: 1234 - RNA, 20 nt, synthetic construct
  misc_feature 1..20: note = synthetic sequence
  source 1..20: mol_type = other RNA
gcgttggcatttgtatagag

SEQ ID NO: 1235 - RNA, 19 nt, synthetic construct
  misc_feature 1..19: note = synthetic sequence
  source 1..19: mol_type = other RNA
tgggctaagtagcataatg

SEQ ID NO: 1236 - RNA, 20 nt, synthetic construct
  misc_feature 1..20: note = synthetic sequence
  source 1..20: mol_type = other RNA
tttgggctaatgtagcataa

SEQ ID NO: 1237 - RNA, 20 nt, synthetic construct
  misc_feature 1..20: note = synthetic sequence
  source 1..20: mol_type = other RNA
gcttaactccttaatattaa

SEQ ID NO: 1238 - RNA, 20 nt, synthetic construct
  misc_feature 1..20: note = synthetic sequence
  source 1..20: mol_type = other RNA
tcttctatattaaagcagat

SEQ ID NO: 1239 - RNA, 20 nt, synthetic construct
  misc_feature 1..20: note = synthetic sequence
  source 1..20: mol_type = other RNA
cttctatattaaagcagatt

SEQ ID NO: 1240 - RNA, 20 nt, synthetic construct
  misc_feature 1..20: note = synthetic sequence
  source 1..20: mol_type = other RNA
aatatataactaccttgggt

SEQ ID NO: 1241 - RNA, 20 nt, synthetic construct
  misc_feature 1..20: note = synthetic sequence
  source 1..20: mol_type = other RNA
acctccattctactctttgg

SEQ ID NO: 1242 - RNA, 20 nt, synthetic construct
  misc_feature 1..20: note = synthetic sequence
  source 1..20: mol_type = other RNA
tttcaatgatatccaaccca

SEQ ID NO: 1243 - RNA, 20 nt, synthetic construct
  misc_feature 1..20: note = synthetic sequence
  source 1..20: mol_type = other RNA
agtacctccattctactctt

SEQ ID NO: 1244 - RNA, 20 nt, synthetic construct
  misc_feature 1..20: note = synthetic sequence
  source 1..20: mol_type = other RNA
ctatcctccaaagagtagaa

SEQ ID NO: 1245 - RNA, 20 nt, synthetic construct
  misc_feature 1..20: note = synthetic sequence
  source 1..20: mol_type = other RNA
ttttgctacatatttcaggc

SEQ ID NO: 1246 - RNA, 20 nt, synthetic construct
  misc_feature 1..20: note = synthetic sequence
  source 1..20: mol_type = other RNA
tttgctacatatttcaggct

SEQ ID NO: 1247 - RNA, 20 nt, synthetic construct
  misc_feature 1..20: note = synthetic sequence
  source 1..20: mol_type = other RNA
gggttggatatcattgaaaa

SEQ ID NO: 1248 - RNA, 19 nt, synthetic construct
  misc_feature 1..19: note = synthetic sequence
  source 1..19: mol_type = other RNA
atatttcaggctgggttct

SEQ ID NO: 1249 - RNA, 20 nt, synthetic construct
  misc_feature 1..20: note = synthetic sequence
  source 1..20: mol_type = other RNA
ttgaaatatataactacctt

SEQ ID NO: 1250 - RNA, 20 nt, synthetic construct
  misc_feature 1..20: note = synthetic sequence
  source 1..20: mol_type = other RNA
attgaaatatataactacct

SEQ ID NO: 1251 - RNA, 20 nt, synthetic construct
  misc_feature 1..20: note = synthetic sequence
  source 1..20: mol_type = other RNA
gtgagtagtggggcacttta

SEQ ID NO: 1252 - RNA, 20 nt, synthetic construct
  misc_feature 1..20: note = synthetic sequence
  source 1..20: mol_type = other RNA
tgtatgtagaaggttaacta

SEQ ID NO: 1253 - RNA, 20 nt, synthetic construct
  misc_feature 1..20: note = synthetic sequence
  source 1..20: mol_type = other RNA
gagcctaataaatgtacaat

SEQ ID NO: 1254 - RNA, 20 nt, synthetic construct
  misc_feature 1..20: note = synthetic sequence
  source 1..20: mol_type = other RNA
ttgtatgtagaaggttaact

SEQ ID NO: 1255 - RNA, 19 nt, synthetic construct
  misc_feature 1..19: note = synthetic sequence
  source 1..19: mol_type = other RNA
caatttgttttgagtaact

SEQ ID NO: 1256 - RNA, 20 nt, synthetic construct
  misc_feature 1..20: note = synthetic sequence
  source 1..20: mol_type = other RNA
tgccttctgaaatagtccag

SEQ ID NO: 1257 - RNA, 20 nt, synthetic construct
  misc_feature 1..20: note = synthetic sequence
  source 1..20: mol_type = other RNA
gttaatagggaaacagcata

SEQ ID NO: 1258 - RNA, 20 nt, synthetic construct
  misc_feature 1..20: note = synthetic sequence
  source 1..20: mol_type = other RNA
aacaatgcagagttaattgt

SEQ ID NO: 1259 - RNA, 20 nt, synthetic construct
  misc_feature 1..20: note = synthetic sequence
  source 1..20: mol_type = other RNA
gaacatgttgagtagacaca

SEQ ID NO: 1260 - RNA, 20 nt, synthetic construct
  misc_feature 1..20: note = synthetic sequence
  source 1..20: mol_type = other RNA
tttatcatctgtgtctattc

SEQ ID NO: 1261 - RNA, 20 nt, synthetic construct
  misc_feature 1..20: note = synthetic sequence
  source 1..20: mol_type = other RNA
tctttactttcttgactata

SEQ ID NO: 1262 - RNA, 20 nt, synthetic construct
  misc_feature 1..20: note = synthetic sequence
  source 1..20: mol_type = other RNA
aatattctcaaacctcgttc

SEQ ID NO: 1263 - RNA, 20 nt, synthetic construct
  misc_feature 1..20: note = synthetic sequence
  source 1..20: mol_type = other RNA
attaactgtgttccagaacg

SEQ ID NO: 1264 - RNA, 20 nt, synthetic construct
  misc_feature 1..20: note = synthetic sequence
  source 1..20: mol_type = other RNA
taactgcttctttggatgac

SEQ ID NO: 1265 - RNA, 20 nt, synthetic construct
  misc_feature 1..20: note = synthetic sequence
  source 1..20: mol_type = other RNA
gaccagaacagtgtaagttt

SEQ ID NO: 1266 - RNA, 20 nt, synthetic construct
  misc_feature 1..20: note = synthetic sequence
  source 1..20: mol_type = other RNA
accagaacagtgtaagttta

SEQ ID NO: 1267 - RNA, 20 nt, synthetic construct
  misc_feature 1..20: note = synthetic sequence
  source 1..20: mol_type = other RNA
ctactttttccccactactg

SEQ ID NO: 1268 - RNA, 20 nt, synthetic construct
  misc_feature 1..20: note = synthetic sequence
  source 1..20: mol_type = other RNA
tggaacacagttaattcact

SEQ ID NO: 1269 - RNA, 20 nt, synthetic construct
  misc_feature 1..20: note = synthetic sequence
  source 1..20: mol_type = other RNA
gtgttgtttaactgcttctt

SEQ ID NO: 1270 - DNA, 20 bp, synthetic construct
  misc_feature 1..20: note = synthetic sequence
  source 1..20: mol_type = other DNA
aactgtcagttgcatattcc

SEQ ID NO: 1271 - DNA, 20 bp, synthetic construct
  misc_feature 1..20: note = synthetic sequence
  source 1..20: mol_type = other DNA
cagaaaggaatgctggtacc

SEQ ID NO: 1272 - DNA, 20 bp, synthetic construct
  misc_feature 1..20: note = synthetic sequence
  source 1..20: mol_type = other DNA
tctgcctacacaatgaatgg

SEQ ID NO: 1273 - DNA, 20 bp, synthetic construct
  misc_feature 1..20: note = synthetic sequence
  source 1..20: mol_type = other DNA
cacagatcaatccaattgtt

SEQ ID NO: 1274 - DNA, 20 bp, synthetic construct
  misc_feature 1..20: note = synthetic sequence
  source 1..20: mol_type = other DNA
ttgacaggtggaaagtacat

SEQ ID NO: 1275 - DNA, 20 bp, synthetic construct
  misc_feature 1..20: note = synthetic sequence
  source 1..20: mol_type = other DNA
acatttttaggcttgacagg

SEQ ID NO: 1276 - DNA, 20 bp, synthetic construct
  misc_feature 1..20: note = synthetic sequence
  source 1..20: mol_type = other DNA
ctctcccatgacagactccc

SEQ ID NO: 1277 - DNA, 20 bp, synthetic construct
  misc_feature 1..20: note = synthetic sequence
  source 1..20: mol_type = other DNA
ttggtaagagttatgataag

SEQ ID NO: 1278 - DNA, 20 bp, synthetic construct
  misc_feature 1..20: note = synthetic sequence
  source 1..20: mol_type = other DNA
aacacaaattaagttcacct

SEQ ID NO: 1279 - DNA, 20 bp, synthetic construct
  misc_feature 1..20: note = synthetic sequence
  source 1..20: mol_type = other DNA
aggatcagtgctgtagtgcc

SEQ ID NO: 1280 - DNA, 20 bp, synthetic construct
  misc_feature 1..20: note = synthetic sequence
  source 1..20: mol_type = other DNA
ggccgtttattattattgac

SEQ ID NO: 1281 - DNA, 20 bp, synthetic construct
  misc_feature 1..20: note = synthetic sequence
  source 1..20: mol_type = other DNA
tctcaggattgctatgcaac

SEQ ID NO: 1282 - DNA, 20 bp, synthetic construct
  misc_feature 1..20: note = synthetic sequence
  source 1..20: mol_type = other DNA
caggaagacataccatgtaa

SEQ ID NO: 1283 - DNA, 20 bp, synthetic construct
  misc_feature 1..20: note = synthetic sequence
  source 1..20: mol_type = other DNA
agcagggctctttcagtttc

SEQ ID NO: 1284 - DNA, 20 bp, synthetic construct
  misc_feature 1..20: note = synthetic sequence
  source 1..20: mol_type = other DNA
taacattttcagcttgaacc

SEQ ID NO: 1285 - DNA, 20 bp, synthetic construct
  misc_feature 1..20: note = synthetic sequence
  source 1..20: mol_type = other DNA
tcaagctgaaaatgttacac

SEQ ID NO: 1286 - DNA, 20 bp, synthetic construct
  misc_feature 1..20: note = synthetic sequence
  source 1..20: mol_type = other DNA
gtaacattttcagcttgaac

SEQ ID NO: 1287 - DNA, 20 bp, synthetic construct
  misc_feature 1..20: note = synthetic sequence
  source 1..20: mol_type = other DNA
cagaatgaattttggagcac

SEQ ID NO: 1288 - DNA, 20 bp, synthetic construct
  misc_feature 1..20: note = synthetic sequence
  source 1..20: mol_type = other DNA
tttattattattgactggtg

SEQ ID NO: 1289 - DNA, 20 bp, synthetic construct
  misc_feature 1..20: note = synthetic sequence
  source 1..20: mol_type = other DNA
agaagaatctgacctttaca

SEQ ID NO: 1290 - DNA, 20 bp, synthetic construct
  misc_feature 1..20: note = synthetic sequence
  source 1..20: mol_type = other DNA
gcagggctctttcagtttct

SEQ ID NO: 1291 - DNA, 20 bp, synthetic construct
  misc_feature 1..20: note = synthetic sequence
  source 1..20: mol_type = other DNA
ctaaacagtagccaggcgtg

SEQ ID NO: 1292 - DNA, 20 bp, synthetic construct
  misc_feature 1..20: note = synthetic sequence
  source 1..20: mol_type = other DNA
cgcctggctactgtttagtg

SEQ ID NO: 1293 - DNA, 20 bp, synthetic construct
  misc_feature 1..20: note = synthetic sequence
  source 1..20: mol_type = other DNA
ctccgcactaaacagtagcc

SEQ ID NO: 1294 - DNA, 20 bp, synthetic construct
  misc_feature 1..20: note = synthetic sequence
  source 1..20: mol_type = other DNA
gtagccaggcgtgtggatgt

SEQ ID NO: 1295 - DNA, 20 bp, synthetic construct
  misc_feature 1..20: note = synthetic sequence
  source 1..20: mol_type = other DNA
cttggctttgactattctgc

SEQ ID NO: 1296 - DNA, 20 bp, synthetic construct
  misc_feature 1..20: note = synthetic sequence
  source 1..20: mol_type = other DNA
agtagccaggcgtgtggatg

SEQ ID NO: 1297 - DNA, 20 bp, synthetic construct
  misc_feature 1..20: note = synthetic sequence
  source 1..20: mol_type = other DNA
tcctcccacatccacacgcc

SEQ ID NO: 1298 - DNA, 20 bp, synthetic construct
  misc_feature 1..20: note = synthetic sequence
  source 1..20: mol_type = other DNA
ttggctttgactattctgct

SEQ ID NO: 1299 - DNA, 20 bp, synthetic construct
  misc_feature 1..20: note = synthetic sequence
  source 1..20: mol_type = other DNA
ataatgtctctggcttgtaa

SEQ ID NO: 1300 - DNA, 20 bp, synthetic construct
  misc_feature 1..20: note = synthetic sequence
  source 1..20: mol_type = other DNA
tggtacccggcagctctctg

SEQ ID NO: 1301 - DNA, 20 bp, synthetic construct
  misc_feature 1..20: note = synthetic sequence
  source 1..20: mol_type = other DNA
gtgggaggaacctcaaagag

SEQ ID NO: 1302 - DNA, 20 bp, synthetic construct
  misc_feature 1..20: note = synthetic sequence
  source 1..20: mol_type = other DNA
tgactattctgctgggaaca

SEQ ID NO: 1303 - DNA, 20 bp, synthetic construct
  misc_feature 1..20: note = synthetic sequence
  source 1..20: mol_type = other DNA
ctctctgaggaatgttccct

SEQ ID NO: 1304 - DNA, 20 bp, synthetic construct
  misc_feature 1..20: note = synthetic sequence
  source 1..20: mol_type = other DNA
aacattcctcagagagctgc

SEQ ID NO: 1305 - DNA, 20 bp, synthetic construct
  misc_feature 1..20: note = synthetic sequence
  source 1..20: mol_type = other DNA
attctgaagctccaaacaat

SEQ ID NO: 1306 - DNA, 20 bp, synthetic construct
  misc_feature 1..20: note = synthetic sequence
  source 1..20: mol_type = other DNA
taaattactctgctaaagta

SEQ ID NO: 1307 - DNA, 20 bp, synthetic construct
  misc_feature 1..20: note = synthetic sequence
  source 1..20: mol_type = other DNA
agtacaaaccaggtttgtac

SEQ ID NO: 1308 - DNA, 20 bp, synthetic construct
  misc_feature 1..20: note = synthetic sequence
  source 1..20: mol_type = other DNA
atatccttccagtacaaacc

SEQ ID NO: 1309 - DNA, 20 bp, synthetic construct
  misc_feature 1..20: note = synthetic sequence
  source 1..20: mol_type = other DNA
caaaccaggtttgtactgga

SEQ ID NO: 1310 - DNA, 20 bp, synthetic construct
  misc_feature 1..20: note = synthetic sequence
  source 1..20: mol_type = other DNA
ggcagctaaagcatcactga

SEQ ID NO: 1311 - DNA, 20 bp, synthetic construct
  misc_feature 1..20: note = synthetic sequence
  source 1..20: mol_type = other DNA
atctctgagtagtacaaacc

SEQ ID NO: 1312 - DNA, 20 bp, synthetic construct
  misc_feature 1..20: note = synthetic sequence
  source 1..20: mol_type = other DNA
gtgtcccattctctttgact

SEQ ID NO: 1313 - DNA, 20 bp, synthetic construct
  misc_feature 1..20: note = synthetic sequence
  source 1..20: mol_type = other DNA
tgtgtcccattctctttgac

SEQ ID NO: 1314 - DNA, 20 bp, synthetic construct
  misc_feature 1..20: note = synthetic sequence
  source 1..20: mol_type = other DNA
ttctgaatgttgaacaagta

SEQ ID NO: 1315 - DNA, 20 bp, synthetic construct
  misc_feature 1..20: note = synthetic sequence
  source 1..20: mol_type = other DNA
gtctcccagtcaaagagaat

SEQ ID NO: 1316 - DNA, 20 bp, synthetic construct
  misc_feature 1..20: note = synthetic sequence
  source 1..20: mol_type = other DNA
attctctttgactgggagac

SEQ ID NO: 1317 - DNA, 20 bp, synthetic construct
  misc_feature 1..20: note = synthetic sequence
  source 1..20: mol_type = other DNA
tctttgactgggagacaggc

SEQ ID NO: 1318 - RNA, 20 nt, synthetic construct
  misc_feature 1..20: note = synthetic sequence
  source 1..20: mol_type = other RNA
aactgtcagttgcatattcc

SEQ ID NO: 1319 - RNA, 20 nt, synthetic construct
  misc_feature 1..20: note = synthetic sequence
  source 1..20: mol_type = other RNA
cagaaaggaatgctggtacc

SEQ ID NO: 1320 - RNA, 20 nt, synthetic construct
  misc_feature 1..20: note = synthetic sequence
  source 1..20: mol_type = other RNA
tctgcctacacaatgaatgg

SEQ ID NO: 1321 - RNA, 20 nt, synthetic construct
  misc_feature 1..20: note = synthetic sequence
  source 1..20: mol_type = other RNA
cacagatcaatccaattgtt

SEQ ID NO: 1322 - RNA, 20 nt, synthetic construct
  misc_feature 1..20: note = synthetic sequence
  source 1..20: mol_type = other RNA
ttgacaggtggaaagtacat

SEQ ID NO: 1323 - RNA, 20 nt, synthetic construct
  misc_feature 1..20: note = synthetic sequence
  source 1..20: mol_type = other RNA
acatttttaggcttgacagg

SEQ ID NO: 1324 - RNA, 20 nt, synthetic construct
  misc_feature 1..20: note = synthetic sequence
  source 1..20: mol_type = other RNA
ctctcccatgacagactccc

SEQ ID NO: 1325 - RNA, 20 nt, synthetic construct
  misc_feature 1..20: note = synthetic sequence
  source 1..20: mol_type = other RNA
ttggtaagagttatgataag

SEQ ID NO: 1326 - RNA, 20 nt, synthetic construct
  misc_feature 1..20: note = synthetic sequence
  source 1..20: mol_type = other RNA
aacacaaattaagttcacct

SEQ ID NO: 1327 - RNA, 20 nt, synthetic construct
  misc_feature 1..20: note = synthetic sequence
  source 1..20: mol_type = other RNA
aggatcagtgctgtagtgcc

SEQ ID NO: 1328 - RNA, 20 nt, synthetic construct
  misc_feature 1..20: note = synthetic sequence
  source 1..20: mol_type = other RNA
ggccgtttattattattgac

SEQ ID NO: 1329 - RNA, 20 nt, synthetic construct
  misc_feature 1..20: note = synthetic sequence
  source 1..20: mol_type = other RNA
tctcaggattgctatgcaac

SEQ ID NO: 1330 - RNA, 20 nt, synthetic construct
  misc_feature 1..20: note = synthetic sequence
  source 1..20: mol_type = other RNA
caggaagacataccatgtaa

SEQ ID NO: 1331 - RNA, 20 nt, synthetic construct
  misc_feature 1..20: note = synthetic sequence
  source 1..20: mol_type = other RNA
agcagggctctttcagtttc

SEQ ID NO: 1332 - RNA, 20 nt, synthetic construct
  misc_feature 1..20: note = synthetic sequence
  source 1..20: mol_type = other RNA
taacattttcagcttgaacc

SEQ ID NO: 1333 - RNA, 20 nt, synthetic construct
  misc_feature 1..20: note = synthetic sequence
  source 1..20: mol_type = other RNA
tcaagctgaaaatgttacac

SEQ ID NO: 1334 - RNA, 20 nt, synthetic construct
  misc_feature 1..20: note = synthetic sequence
  source 1..20: mol_type = other RNA
gtaacattttcagcttgaac

SEQ ID NO: 1335 - RNA, 20 nt, synthetic construct
  misc_feature 1..20: note = synthetic sequence
  source 1..20: mol_type = other RNA
cagaatgaattttggagcac

SEQ ID NO: 1336 - RNA, 20 nt, synthetic construct
  misc_feature 1..20: note = synthetic sequence
  source 1..20: mol_type = other RNA
tttattattattgactggtg

SEQ ID NO: 1337 - RNA, 20 nt, synthetic construct
  misc_feature 1..20: note = synthetic sequence
  source 1..20: mol_type = other RNA
agaagaatctgacctttaca

SEQ ID NO: 1338 - RNA, 20 nt, synthetic construct
  misc_feature 1..20: note = synthetic sequence
  source 1..20: mol_type = other RNA
gcagggctctttcagtttct

SEQ ID NO: 1339 - RNA, 20 nt, synthetic construct
  misc_feature 1..20: note = synthetic sequence
  source 1..20: mol_type = other RNA
ctaaacagtagccaggcgtg

SEQ ID NO: 1340 - RNA, 20 nt, synthetic construct
  misc_feature 1..20: note = synthetic sequence
  source 1..20: mol_type = other RNA
cgcctggctactgtttagtg

SEQ ID NO: 1341 - RNA, 20 nt, synthetic construct
  misc_feature 1..20: note = synthetic sequence
  source 1..20: mol_type = other RNA
ctccgcactaaacagtagcc

SEQ ID NO: 1342 - RNA, 20 nt, synthetic construct
  misc_feature 1..20: note = synthetic sequence
  source 1..20: mol_type = other RNA
gtagccaggcgtgtggatgt

SEQ ID NO: 1343 - RNA, 20 nt, synthetic construct
  misc_feature 1..20: note = synthetic sequence
  source 1..20: mol_type = other RNA
cttggctttgactattctgc

SEQ ID NO: 1344 - RNA, 20 nt, synthetic construct
  misc_feature 1..20: note = synthetic sequence
  source 1..20: mol_type = other RNA
agtagccaggcgtgtggatg

SEQ ID NO: 1345 - RNA, 20 nt, synthetic construct
  misc_feature 1..20: note = synthetic sequence
  source 1..20: mol_type = other RNA
tcctcccacatccacacgcc

SEQ ID NO: 1346 - RNA, 20 nt, synthetic construct
  misc_feature 1..20: note = synthetic sequence
  source 1..20: mol_type = other RNA
ttggctttgactattctgct

SEQ ID NO: 1347 - RNA, 20 nt, synthetic construct
  misc_feature 1..20: note = synthetic sequence
  source 1..20: mol_type = other RNA
ataatgtctctggcttgtaa

SEQ ID NO: 1348 - RNA, 20 nt, synthetic construct
  misc_feature 1..20: note = synthetic sequence
  source 1..20: mol_type = other RNA
tggtacccggcagctctctg

SEQ ID NO: 1349 - RNA, 20 nt, synthetic construct
  misc_feature 1..20: note = synthetic sequence
  source 1..20: mol_type = other RNA
gtgggaggaacctcaaagag

SEQ ID NO: 1350 - RNA, 20 nt, synthetic construct
  misc_feature 1..20: note = synthetic sequence
  source 1..20: mol_type = other RNA
tgactattctgctgggaaca

SEQ ID NO: 1351 - RNA, 20 nt, synthetic construct
  misc_feature 1..20: note = synthetic sequence
  source 1..20: mol_type = other RNA
ctctctgaggaatgttccct

SEQ ID NO: 1352 - RNA, 20 nt, synthetic construct
  misc_feature 1..20: note = synthetic sequence
  source 1..20: mol_type = other RNA
aacattcctcagagagctgc

SEQ ID NO: 1353 - RNA, 20 nt, synthetic construct
  misc_feature 1..20: note = synthetic sequence
  source 1..20: mol_type = other RNA
attctgaagctccaaacaat

SEQ ID NO: 1354 - RNA, 20 nt, synthetic construct
  misc_feature 1..20: note = synthetic sequence
  source 1..20: mol_type = other RNA
taaattactctgctaaagta

SEQ ID NO: 1355 - RNA, 20 nt, synthetic construct
  misc_feature 1..20: note = synthetic sequence
  source 1..20: mol_type = other RNA
agtacaaaccaggtttgtac

SEQ ID NO: 1356 - RNA, 20 nt, synthetic construct
  misc_feature 1..20: note = synthetic sequence
  source 1..20: mol_type = other RNA
atatccttccagtacaaacc

SEQ ID NO: 1357 - RNA, 20 nt, synthetic construct
  misc_feature 1..20: note = synthetic sequence
  source 1..20: mol_type = other RNA
caaaccaggtttgtactgga

SEQ ID NO: 1358 - RNA, 20 nt, synthetic construct
  misc_feature 1..20: note = synthetic sequence
  source 1..20: mol_type = other RNA
ggcagctaaagcatcactga

SEQ ID NO: 1359 - RNA, 20 nt, synthetic construct
  misc_feature 1..20: note = synthetic sequence
  source 1..20: mol_type = other RNA
atctctgagtagtacaaacc

SEQ ID NO: 1360 - RNA, 20 nt, synthetic construct
  misc_feature 1..20: note = synthetic sequence
  source 1..20: mol_type = other RNA
gtgtcccattctctttgact

SEQ ID NO: 1361 - RNA, 20 nt, synthetic construct
  misc_feature 1..20: note = synthetic sequence
  source 1..20: mol_type = other RNA
tgtgtcccattctctttgac

SEQ ID NO: 1362 - RNA, 20 nt, synthetic construct
  misc_feature 1..20: note = synthetic sequence
  source 1..20: mol_type = other RNA
ttctgaatgttgaacaagta

SEQ ID NO: 1363 - RNA, 20 nt, synthetic construct
  misc_feature 1..20: note = synthetic sequence
  source 1..20: mol_type = other RNA
gtctcccagtcaaagagaat

SEQ ID NO: 1364 - RNA, 20 nt, synthetic construct
  misc_feature 1..20: note = synthetic sequence
  source 1..20: mol_type = other RNA
attctctttgactgggagac

SEQ ID NO: 1365 - RNA, 20 nt, synthetic construct
  misc_feature 1..20: note = synthetic sequence
  source 1..20: mol_type = other RNA
tctttgactgggagacaggc

SEQ ID NO: 1366 - DNA, 82 bp, synthetic construct
  misc_feature 1..82: note = synthetic sequence
  source 1..82: mol_type = other DNA
gttttagagctagaaatagcaagttaaaataaggctagtccgttatcaacttgaaaaagtggcaccgagtcggtgctttttt

SEQ ID NO: 1367 - RNA, 82 nt, synthetic construct
  misc_feature 1..82: note = synthetic sequence
  source 1..82: mol_type = other RNA
gttttagagctagaaatagcaagttaaaataaggctagtccgttatcaacttgaaaaagtggcaccgagtcggtgctttttt

SEQ ID NO: 1368 - DNA, 23 bp, synthetic construct
  misc_feature 1..23: note = synthetic sequence
  source 1..23: mol_type = other DNA
gtggtgtcctttgaatatgcagg

SEQ ID NO: 1369 - DNA, 23 bp, synthetic construct
  misc_feature 1..23: note = synthetic sequence
  source 1..23: mol_type = other DNA
agattgtccaggatataatttgg

SEQ ID NO: 1370 - DNA, 23 bp, synthetic construct
  misc_feature 1..23: note = synthetic sequence
  source 1..23: mol_type = other DNA
ttagcaaccaaattatatcctgg

SEQ ID NO: 1371 - DNA, 23 bp, synthetic construct
  misc_feature 1..23: note = synthetic sequence
  source 1..23: mol_type = other DNA
gttgaaattaaactacacactgg

SEQ ID NO: 1372 - DNA, 23 bp, synthetic construct
  misc_feature 1..23: note = synthetic sequence
  source 1..23: mol_type = other DNA
atctttacctgcatattcaaagg

SEQ ID NO: 1373 - DNA, 23 bp, synthetic construct
  misc_feature 1..23: note = synthetic sequence
  source 1..23: mol_type = other DNA
tacacatttttaggcttgacagg

SEQ ID NO: 1374 - DNA, 23 bp, synthetic construct
  misc_feature 1..23: note = synthetic sequence
  source 1..23: mol_type = other DNA
cattcctgggagtctgtcatggg

SEQ ID NO: 1375 - DNA, 23 bp, synthetic construct
  misc_feature 1..23: note = synthetic sequence
  source 1..23: mol_type = other DNA
tgtatgatgctataataccaagg

SEQ ID NO: 1376 - DNA, 23 bp, synthetic construct
  misc_feature 1..23: note = synthetic sequence
  source 1..23: mol_type = other DNA
gtggaaagtacataggaccttgg

SEQ ID NO: 1377 - DNA, 23 bp, synthetic construct
  misc_feature 1..23: note = synthetic sequence
  source 1..23: mol_type = other DNA
tcttatcataactcttaccaagg

SEQ ID NO: 1378 - DNA, 24 bp, synthetic construct
  misc_feature 1..24: note = synthetic sequence
  source 1..24: mol_type = other DNA
caccgtggtgtcctttgaatatgc

SEQ ID NO: 1379 - DNA, 25 bp, synthetic construct
  misc_feature 1..25: note = synthetic sequence
  source 1..25: mol_type = other DNA
caccgagattgtccaggatataatt

SEQ ID NO: 1380 - DNA, 25 bp, synthetic construct
  misc_feature 1..25: note = synthetic sequence
  source 1..25: mol_type = other DNA
caccgttagcaaccaaattatatcc

SEQ ID NO: 1381 - DNA, 24 bp, synthetic construct
  misc_feature 1..24: note = synthetic sequence
  source 1..24: mol_type = other DNA
caccgttgaaattaaactacacac

SEQ ID NO: 1382 - DNA, 25 bp, synthetic construct
  misc_feature 1..25: note = synthetic sequence
  source 1..25: mol_type = other DNA
caccgatctttacctgcatattcaa

SEQ ID NO: 1383 - DNA, 25 bp, synthetic construct
  misc_feature 1..25: note = synthetic sequence
  source 1..25: mol_type = other DNA
caccgtacacatttttaggcttgac

SEQ ID NO: 1384 - DNA, 25 bp, synthetic construct
  misc_feature 1..25: note = synthetic sequence
  source 1..25: mol_type = other DNA
caccgcattcctgggagtctgtcat

SEQ ID NO: 1385 - DNA, 25 bp, synthetic construct
  misc_feature 1..25: note = synthetic sequence
  source 1..25: mol_type = other DNA
caccgtgtatgatgctataatacca

SEQ ID NO: 1386 - DNA, 24 bp, synthetic construct
  misc_feature 1..24: note = synthetic sequence
  source 1..24: mol_type = other DNA
caccgtggaaagtacataggacct

SEQ ID NO: 1387 - DNA, 25 bp, synthetic construct
  misc_feature 1..25: note = synthetic sequence
  source 1..25: mol_type = other DNA
caccgtcttatcataactcttacca

SEQ ID NO: 1388 - DNA, 24 bp, synthetic construct
  misc_feature 1..24: note = synthetic sequence
  source 1..24: mol_type = other DNA
aaacgcatattcaaaggacaccac

SEQ ID NO: 1389 - DNA, 25 bp, synthetic construct
  misc_feature 1..25: note = synthetic sequence
  source 1..25: mol_type = other DNA
aaacaattatatcctggacaatctc

SEQ ID NO: 1390 - DNA, 25 bp, synthetic construct
  misc_feature 1..25: note = synthetic sequence
  source 1..25: mol_type = other DNA
aaacggatataatttggttgctaac

SEQ ID NO: 1391 - DNA, 24 bp, synthetic construct
  misc_feature 1..24: note = synthetic sequence
  source 1..24: mol_type = other DNA
aaacgtgtgtagtttaatttcaac

SEQ ID NO: 1392 - DNA, 25 bp, synthetic construct
  misc_feature 1..25: note = synthetic sequence
  source 1..25: mol_type = other DNA
aaacttgaatatgcaggtaaagatc

SEQ ID NO: 1393 - DNA, 25 bp, synthetic construct
  misc_feature 1..25: note = synthetic sequence
  source 1..25: mol_type = other DNA
aaacgtcaagcctaaaaatgtgtac

SEQ ID NO: 1394 - DNA, 25 bp, synthetic construct
  misc_feature 1..25: note = synthetic sequence
  source 1..25: mol_type = other DNA
aaacatgacagactcccaggaatgc

SEQ ID NO: 1395 - DNA, 25 bp, synthetic construct
  misc_feature 1..25: note = synthetic sequence
  source 1..25: mol_type = other DNA
aaactggtattatagcatcatacac

SEQ ID NO: 1396 - DNA, 24 bp, synthetic construct
  misc_feature 1..24: note = synthetic sequence
  source 1..24: mol_type = other DNA
aaacaggtcctatgtactttccac

SEQ ID NO: 1397 - DNA, 25 bp, synthetic construct
  misc_feature 1..25: note = synthetic sequence
  source 1..25: mol_type = other DNA
aaactggtaagagttatgataagac

SEQ ID NO: 1398 - DNA, 21 bp, synthetic construct
  misc_feature 1..21: note = synthetic sequence
  source 1..21: mol_type = other DNA
ctggacggagctggtttatct

SEQ ID NO: 1399 - DNA, 21 bp, synthetic construct
  misc_feature 1..21: note = synthetic sequence
  source 1..21: mol_type = other DNA
cccttttcttggcgtattgcc

SEQ ID NO: 1400 - DNA, 20 bp, synthetic construct
  misc_feature 1..20: note = synthetic sequence
  source 1..20: mol_type = other DNA
gcctgggtctctgctatcaa

SEQ ID NO: 1401 - DNA, 20 bp, synthetic construct
  misc_feature 1..20: note = synthetic sequence
  source 1..20: mol_type = other DNA
gccactttgtactccgcact

SEQ ID NO: 1402 - DNA, 19 bp, synthetic construct
  misc_feature 1..19: note = synthetic sequence
  source 1..19: mol_type = other DNA
gagagtttgcctggacgga

SEQ ID NO: 1403 - DNA, 23 bp, synthetic construct
  misc_feature 1..23: note = synthetic sequence
  source 1..23: mol_type = other DNA
cctctctatacaaatgccaacgc

SEQ ID NO: 1404 - DNA, 20 bp, synthetic construct
  misc_feature 1..20: note = synthetic sequence
  source 1..20: mol_type = other DNA
tccaggcctcctctctttga

SEQ ID NO: 1405 - DNA, 21 bp, synthetic construct
  misc_feature 1..21: note = synthetic sequence
  source 1..21: mol_type = other DNA
cccttttcttggcgtattgcc

SEQ ID NO: 1406 - DNA, 20 bp, synthetic construct
  misc_feature 1..20: note = synthetic sequence
  source 1..20: mol_type = other DNA
ccgacaagggcgatttgaca

SEQ ID NO: 1407 - DNA, 20 bp, synthetic construct
  misc_feature 1..20: note = synthetic sequence
  source 1..20: mol_type = other DNA
aagtcgcctccaataggtgc

SEQ ID NO: 1408 - DNA, 20 bp, synthetic construct
  misc_feature 1..20: note = synthetic sequence
  source 1..20: mol_type = other DNA
actcattaccgctgcccaaa

SEQ ID NO: 1409 - DNA, 20 bp, synthetic construct
  misc_feature 1..20: note = synthetic sequence
  source 1..20: mol_type = other DNA
tcttccaaagcagcctctcg
